(19) United States
(12) Patent Application Publication
(10) Pub. No.: US 2011/0136893 A1
(43) Pub. Date: Jun. 9, 2011

(54) OLIGONUCLEOTIDE-, PROTEIN AND/OR PEPTIDE-POLYMER CONJUGATES

(76) Inventors: Karl-Hermann Schlingensiepen, Donaustauf (DE); Reimar Schlingensiepen, Regensburg (DE); Dagmar Fischer, Regensburg (DE); Andreas Mitsch, Lappersdorf-Piehlmuhle (DE)

(21) Appl. No.: 12/516,439

(22) PCT Filed: Dec. 21, 2007
(86) PCT No.: PCT/EP07/64494

§ 371 Date: Mar. 17, 2010

(30) Foreign Application Priority Data
Dec. 22, 2006 (EP) 06127 100.3

(51) Int. Cl. A61K 31/7088; C07H 21/00; C07H 21/02; A61P 35/00; A61P 31/12; A61P 35/02; A61P 35/04; A61P 31/20; A61P 31/14; A61P 31/22

(52) U.S. Cl. 514/44 R; 536/23.1; 536/24.5

(57) ABSTRACT

A conjugate or compound comprising polyethyleneglycol and an oligonucleotide, wherein at least one polyethyleneglycol is linked to the 5′-end of the oligonucleotide and at least one polyethyleneglycol is linked to the 3′-end of the oligonucleotide, wherein the molecular weight of the polyethyleneglycol linked to the 5′- and 3′-end of the oligonucleotide is identical and is <5000 Da, or wherein the molecular weight of the polyethyleneglycol linked to the 5′- and 3′-end of the oligonucleotide is different.

[0001] The present invention is directed to oligonucleotide-, protein- and/or peptide polymer conjugates.

[0002] Polymers have been widely used in biomaterial, biotechnology and medicine primarily because they are nonimmunogenic and water-soluble (Zhao 1997). In the area of drug delivery, polymer derivatives have been widely used in covalent attachment to proteins to reduce immunogenicity, proteolysis, kidney clearance and to enhance solubility. Similarly, polyethyleneglycol has been attached to low molecular weight, relatively hydrophobic drugs to enhance solubility, reduce toxicity and alter biodistribution.

[0003] Polyethyleneglycol is used as carrier or linked covalently to different therapeutics to enhance the cellular uptake. Another aim of linking polymers to therapeutics is to enlarge the molecular weight and increase the body halflife time. Reasons for this linkage are that those conjugates are described to show advantages such as reduced immunogenicity (Chirila 2001).

[0004] WO 2005/111238 A2 describes high molecular weight PEG-nucleic acid conjugates comprising a delivery aptamer and a therapeutic oligonucleotide sequence which is for example a CpG oligonucleotide, a siRNA oligonucleotide, an antisense oligonucleotide, or an aptamer. The conjugates described in this application have a molecular weight between 10 and 80 kDa and are intended to target the therapeutic oligonucleotide to a specific cell type.

[0005] Jäschke et al. (1994) disclose oligonucleotide conjugates comprising an oligonucleotide and polydisperse PEG linked to the 3′-end, 5′-end and/or internal positions of the oligonucleotide, wherein the oligonucleotide is synthesized by phosphoramidite chemistry. The conjugates contained a varying number of PEG-units, whereby the degree of polymerization of PEG ranged from 5 to 120 for 3′-terminal coupling and from 5 to 32 for 5′-terminal and internal coupling.

[0006] Moreover, WO 2007/109097 A1 describes amongst others iRNA, which includes 2′-modified ribose units and/or phosphorothioate linkages for example the 2′ hydroxyl group is modified by PEG. The molecular weight of PEG is not specified.

[0007] Aptamers conjugated with PEG at the 5′-end of the aptamer are suitable for the treatment, prevention, and/or amelioration of atopic diseases. The molecular weight of PEG is selected from the group consisting of 20, 30, 40, and 60 kDa, wherein PEG is linked to the 3′- and/or the 5′-end of an aptamer (cf. WO 2006/096222 A2).

[0008] Though there are a couple of advantages of PEG conjugates described in prior art, there is no teaching, that polymers could enhance the activity of therapeutics.

[0009] Surprisingly oligonucleotides, proteins and/or peptides such as immunostimulators linked with polymers of a certain weight, in particular linked with polymers of low molecular weight or a combination of low and high molecular weight polymers, show increased activity as well as pharmacological advantages despite of their higher molecular weight. One aspect of this invention is an oligonucleotide, a protein and/or a peptide, e.g., an immunostimulator linked with at least one polymer.

[0010] A further aspect of this invention is the synthesis of these compounds and their use for the preparation of a pharmaceutical composition as well as a method of the treatment of cancer, fibrosis, eye diseases such as glaucoma and/or viral infections such as HIV, FIV, HVA, HVB, HVC or influenza with this conjugate or compound.

[0011] The oligonucleotides, proteins and/or peptides, particularly an immunostimulator linked with at least one polymer (also referred to as “conjugate” or “compound” in the context of this invention) might have for example reduced toxicity especially in kidney and liver. This compound may show further advantages such as at least one of reduced lymphocytopenia, reduced leukocytopenia, reactivation of reduced clotting, reduction of thrombocytopenia, reduced immunogenicity, antigenicity, prolonged circulation halflife time, decreased kidney excretion, modified organ uptake, reduced uptake in organs of the reticuloendothelial system, decreased plasma protein binding, or increased drug stability compared to unconjugated oligonucleotides. Further advantages of the conjugate or compound are for example at least one of reduced coagulation, reduced complement activation, especially reduced C5 complement activation, recovering of the decreased CH₅₀ concentration, or higher cardiovascular and ZNS safety.

[0012] Further advances of the conjugate or compound are for example at least one of enhanced cellular uptake, enhanced affinity for nucleic acid target, altered intracellular localization, enhanced safety, enhanced efficacy, or increased stability in the presence of nucleases.

[0013] Derivatization of an oligonucleotide, a protein or a peptide with a polymer for example non-immunogenic polymer has the potential to alter the pharmacokinetic and pharmacodynamic properties of the oligonucleotide, protein, or peptide making it a more effective therapeutic agent. In particular polyethyleneglycol linked to an oligonucleotide, a protein and/or a peptide is suitable for example for altering solubility characteristics in aqueous or organic solvents, for modulation of the immune response, to increase the stability of an oligonucleotide, i.e., increases for example the resistance against exo- and endonucleases, a protein, or a peptide in solution, to enhance the halflife of substances in vivo and in vitro to aid in penetrating cell membranes, to alter pharmacological properties, to increase biocompatibility, or to prevent oligonucleotide, protein, or peptide adsorption to surfaces.

[0014] These beneficial properties of the modified oligonucleotides, proteins and/or peptides such as immunostimulator make them very useful in a variety of therapeutic applications.

[0015] Particularly advantageous effects such as increased halflife, decreased degradation, increased activity, etc. show oligonucleotides, proteins and/or peptides, which are linked to at least two polymers. Thereby the polymers are either identical or differ in the molecular weight and/or type of polymer. Preferably oligonucleotides, proteins and/or peptides combined with two or more polymers such as polyethyleneglycol (PEG) present a longer halflife, amongst others due to increased enzyme stability such as exonuclease, endonuclease, or proteinase stability, and an improved cell uptake. Depending on the size and structure of the polymer, a polymer with high or low molecular weight (MW) is more effective, or a combination of high and low molecular weight of a polymer such as polyalkylen oxide, e.g. PEG.

[0016] In particular polymers such as polyalkylen oxide, e.g., PEG increase the molecular size, often alter molecular charge, and ordinarily diminish receptor-binding capabilities leading to a reduction of the clearance rate. By sterically shielding the oligonucleotide-, protein-, or peptide-domain susceptible to enzymatic attack. PEG decreases the amount of oligonucleotide, protein, or peptide that is degraded and rendered biologically inactive. In parallel, by sterically masking the immunogenic/antigenic determinates of the therapeutic oligonucleotide, protein, or peptide, the polymer attachment leads to nonimmunogenic and nonantigenic conjugates.

### FIGURES

[0017] The Figures in the following are for better illustration of the invention; however, the invention is not limited to the illustrations presented in the Figures.

[0018] FIG. 1: The figure depicts the inhibition of the immunosuppressor TGF-beta2 in a cell culture incubated with different concentrations of the respective oligonucleotide which is an immunostimulator, respectively the oligonucleotide, here an immunostimulator, linked to one polymer at the 5′- or 3′-end, or two polymers, wherein one is linked to the 5′-end and one is linked to the 3′-end. The experiment was performed according to the description in example 13. The results shown refer to the oligonucleotide of SEQ ID NO 1 phosphorothioate (control) compared to phosphorothioate linked to one or two polyethyleneglycol. The vertical axis indicates the percentage of inhibition of suppression of the immunosuppressor TGF-beta2 (pg/Mio cells in % of untreated control). The black column (1) is the control (no inhibition), adjusted at 100%. The grey columns indicate the relative inhibition of TGF-beta2 by phosphorothioate of SEQ ID NO 1. The white columns indicate the inhibition of TGF-beta2 by the phosphorothioate of SEQ ID NO 1 linked with at least one polyethyleneglycol. Concentrations and weight of the linked polymers are shown in the table below. It can be clearly seen that the oligonucleotide linked to one polymer or linked to two polymers shows increased inhibition of TGF-beta2 compared to an oligonucleotide not linked to a polymer.

| | | Oligo- | | | |
|---|---|---|---|---|---|
| | Colour | nucleotide | | | TGF- |
| Col- | of the | (phosphoro- | Linked | Concen- | beta2 |
| umn | column | thioate) | polymer*) | tration | [%] |
| 1 | black | — | — | — | 100 |
| 2 | grey | SEQ ID NO1 | — | 0.2 microM | 97.1 |
| 2 | white | SEQ ID NO1 | PEG 400 | 0.2 microM | 78.8 |
| | | | (3′-end) | | |
| 3 | grey | SEQ ID NO1 | — | 1.0 microM | 84.0 |
| 3 | white | SEQ ID NO1 | PEG 400 | 1.0 microM | 60.0 |
| | | | (3′-end) | | |
| 4 | grey | SEQ ID NO1 | — | 0.2 microM | 97.0 |
| 4 | white | SEQ ID NO1 | 2 × PEG 400 | 0.2 microM | 71.0 |
| | | | (5′- and 3′-end) | | |
| 5 | grey | SEQ ID NO1 | — | 1.0 microM | 84.0 |
| 5 | white | SEQ ID NO1 | 2 × PEG 400 | 1.0 microM | 58.0 |
| | | | (5′- and 3′end) | | |
| 6 | grey | SEQ ID NO1 | — | 0.2 microM | 94.1 |
| 6 | white | SEQ ID NO1 | PEG 5000 | 0.2 microM | 86.5 |
| | | | (5′-end) | | |
| 7 | grey | SEQ ID NO1 | — | 40 microM | 46.5 |
| 7 | white | SEQ ID NO1 | PEG 5000 | 40 microM | 31.6 |
| | | | (5′-end) | | |
| 8 | grey | SEQ ID NO1 | — | 0.2 microM | 97.06 |
| 8 | white | SEQ ID NO1 | PEG 400 | 0.2 microM | 82.46 |
| | | | (5′ end) | | |
| 9 | grey | SEQ ID NO1 | — | 1.0 microM | 83.97 |
| 9 | white | SEQ ID NO1 | PEG 400 | 1.0 microM | 71.60 |
| | | | (5′ end) | | |

*)the average weight of the linked polymer is indicated in Da/mol

[0019] FIG. 2: The figure depicts the inhibition of the immunosuppressor TGF-beta2 in a cell culture incubated with different concentrations of the respective oligonucleotide, respectively the oligonucleotide linked with at least one polymer. The experiment was performed according to the description in example 13. The results are given from the oligonucleotide with SEQ ID NO 1 phosphorothioate (control) compared to SEQ ID NO 1 phosphorothioate (SEQ1) linked to one or two polyethyleneglycol (PEG) molecules. The vertical axis indicates the percentage of inhibition of suppression of the immunosuppressor TGF-beta2 (pg/Mio cells in % of untreated control). The horizontal axis indicates the concentration of the oligonucleotide in μM. In control samples no oligonucleotide was added (0 μM; control, checked column) to determine the TGF-beta2 baseline forming the reference value to calculate the % of inhibition indicated on the vertical axis. In the further samples oligonucleotides in the concentration of 1 μM, or 2.5 μM were added. The following oligonucleotides were tested: oligonucleotide of SEQ ID NO 1 without PEG (black column), oligonucleotide of SEQ ID NO 1 with PEG-2000 at the 5′-end of the oligonucleotide (white column), oligonucleotide of SEQ ID NO 1 with PEG-400 at the 5′-end and PEG-2000 at the 3′-end of the oligonucleotide (striped column), and oligonucleotide of SEQ ID NO 1 with PEG-2000 at the 5′-end and PEG-400 at the 3′-end of the oligonucleotide (dotted column). The data clearly indicate that an oligonucleotide linked to PEG has an increased inhibitory effect compared to an oligonucleotide without PEG, and a second PEG linked to the oligonucleotide increased the inhibitory effect of the oligonucleotide.

[0020] FIG. 3: This figure shows examples of oligonucleotide sequences of exemplaric genes TGF-beta1, TGF-beta2, TGF-beta3, PGE-rec., VEGF, IL-10, c-erbb2 (Her-2), c-jun, c-fos, and MIA.

[0021] FIG. 4: It presents examples of amino acid sequences of MIA (“Melanoma Inhibitory Activity”; FIG. 4A), TGF-beta1 (FIG. 4B), TGF-beta2 (FIG. 4C), and TGF-beta3 (FIG. 4D). Each amino acid sequence of 4A to 4D forming a peptide or protein fragment of the full length protein is, suitable to be linked with at least one polymer, forming polymer-peptide conjugates and compounds, respectively, or pharmaceutical compositions comprising or consisting of at least one of these conjugates or compounds in pharmaceutical acceptable carriers. FIG. 4E shows examples of peptides of MIA, fibronectin derived peptides and other peptides of the invention.

[0022] FIG. 5: The figures show 3′-exonuclease stability tests of an un-PEGylated oligonucleotide of SEQ ID NO 1 (FIG. 5A), of a 3′-PEGylated oligonucleotide (PEG-400, (FIG. 5B)), of a 5′-PEGylated oligonucleotide (PEG-400, (FIG. 5C), or PEG-2000, (FIG. 5D)), and of a 5′,3′-PEGylated oligonucleotide, wherein PEG-400 is at the 3′- and 5′-end (FIG. 5E), PEG-400 is at the 5′-end and PEG-2000 is at the 3′-end (FIG. 5F), or PEG-2000 is at the 5′-end and PEG-400 is at the 3′-end (FIG. 5G). The oligonucleotides were incubated with a 3′-exonuclease at 37° C. and were tested after 0, 1, 3, 6, 24, 48, 72, and 144 h. FIG. 5A to FIG. 5G show the degradation of the oligonucleotides after 72 h. The degradation increases with the time of incubation (increasing peak area (%) of impurities), wherein the oligonucleotides linked to PEG on the 3′-end, or on both ends are much more resistant to the 3′-exonuclease and the degradation is reduced.

[0023] FIG. 6: These figures show 5′-exonuclease stability tests of an un-PEGylated oligonucleotide of SEQ ID NO 1 (FIG. 6A), of a 5′-PEGylated oligonucleotide (PEG-2000, (FIG. 6B), and PEG-400, (FIG. 6D)), of a 3′-PEGylated oligonucleotide (PEG-400, (FIG. 6C)), and of a 5′,3′-PEGylated oligonucleotide, wherein PEG-400 is at the 3′- and 5′-end (FIG. 6E), PEG-400 is at the 5′-end and PEG-2000 is at the 3′-end (FIG. 6F), or PEG-2000 is at the 5′-end and PEG-400 is at the 3′-end (FIG. 6G). The oligonucleotides were incubated with a 5′-exonuclease at 37° C. and were tested after 0, 1, 3, 6, 24, 48, 72, and 144 h. FIG. 6A to FIG. 6G show the degradation of the oligonucleotide after 72 h. The degradation increases with the time of incubation (increasing peak area (%) of impurities), wherein the oligonucleotides linked to PEG on both ends are much more resistant to the 5′-exonuclease and thus, the degradation is reduced.

[0024] FIG. 7: These figures show an evaluation of the degradation of oligonucleotides with and without PEG by a 3′ exonuclease and a 5′ exonuclease, respectively, as presented in FIGS. 5 and 6. FIGS. 7A and 7B show the degradation of an oligonucleotide of SEQ ID NO: 1 (SEQ1) after 72 h incubation with 3′ exonuclease at 37° C. FIG. 7A demonstrates that the degradation of 3′ PEGylated oligonucleotide (3′ 400 SEQ1) or 3′ 400- and 5′ 400-PEGylated oligonucleotide (3′ 400+5′ 400 SEQ1) is almost completely reduced (cf. FIGS. 5B, 5C, 5E). FIG. 7B presents that an oligonucleotide of SEQ ID NO: 1, which is linked to PEG2000 at the 3′-end and to PEG400 at the 5′-end (3′ 2000+5′ 400 SEQ1), or is linked to PEG400 at the 3′-end and to PEG2000 at the 5′-end (3′ 400+5′ 2000 SEQ1) is degraded in a much lower rate than an oligonucleotide without PEG (SEQ1) (cf. FIGS. 5D, 5F, 5G). FIGS. 7C and 7D show the degradation of an oligonucleotide of SEQ ID NO: 1 (SEQ1) after 72 h incubation with 5′ exonuclease at 37° C. In FIG. 7C is demonstrated that the degradation rate of an oligonucleotide of SEQ ID NO: 1 linked to PEG400 at the 3′-end of the oligonucleotide (3′ 400 SEQ1) as well as such oligonucleotide linked to PEG400 at the 3′-end and the 5′-end of the oligonucleotide (3′ 400+5′ 400 SEQ1) is clearly reduced in comparison to the oligonucleotide of SEQ ID NO: 1 without PEG (SEQ1) (cf. FIGS. 6C, 6D, 6E). FIG. 7D shows that an oligonucleotide linked to PEG2000 at the 5′-end (5′ 2000 SEQ1), linked to PEG2000 at the 3′-end and PEG400 at the 5′-end (3′ 2000+5′ 400 SEQ1), or linked to PEG400 at the 3′-end and PEG2000 at the 5′-end (3′ 400+5′ 2000 SEQ1) (cf. FIGS. 6B, 6F, 6G).

[0025] FIG. 8: This figure shows the chemical reaction of an oligonucleotide having an amino functionalized 5′-end (linker) with PEG-NHS ester resulting in an oligonucleotide linked to PEG at the 5′-end.

[0026] FIG. 9: It presents the chemical reactions for the production of 3′5′-PEGylated oligonucleotides using a 3′-aminomodifier including Fmoc for example C7 CPG as described in example 8.

[0027] FIG. 10: The figure shows the chemical reactions of an alternative method for the production of 3′5′-PEGylated oligonucleotides using a 5′- and 3′-amino modifier for example a 5′-aminomodifier and 3′-aminomodifier C6 CPG as described in example 10.

[0028] FIG. 11: This figure shows the chemical reactions for the production of 3′5′-PEGylated oligonucleotides, wherein the 5′-end of the oligonucleotide is linked to the support using 5′-phosphoramidite building blocks as described in example 11.

[0029] Before the invention is described in further detail, it is to be understood that the invention is not limited to the particular embodiments of the invention described below, as variations of the particular may be made and still fall within the scope of the appended claims. It is also to be understood that the terminology employed is for the purpose of describing particular embodiments, and is not intended to be limiting. Instead, the scope of the present invention will be established by the appended claims.

### DEFINITIONS

### Branched

[0030] The at least one polymer, more preferred the polyalkylene oxide, even more preferred the polyethyleneglycol, in one embodiment is linear in other embodiments it is branched. Branched means that there is at least one branching in the respective polymer comprising that there are several branches in the molecule. Branches in the polymer have the advantage that the molecule is more compact and disadvantages of long linear polymers, such as masking the oligonucleotide, are compensated.

[0031] The term “branched” further comprises polymers such as PEG which are combined via a linker, e.g., a Lys core to form a “pseudo-branched” polymer. In this case the polymer represents a monomere of a multi-polymer complex.

### Diseases and Disorders

[0032] The conjugates or compositions of the invention act as novel therapeutic agents for controlling, treating and/or preventing one or more of cellular proliferative and/or differentiative diseases or disorders, diseases or disorders associated with bone metabolism, immune, hematopoietic, cardiovascular, liver, kidney, muscular, hematological, viral, pain, neurological and/or metabolic diseases or disorders, in particular disorders or diseases associated with undesired TGF-beta signaling. Cellular proliferative and/or differentiative diseases or disorders include for example cancer, e.g., carcinoma, sarcoma, metastatic or hematopoietic neoplastic diseases or disorders such as leukemias. As used herein, the term “cancer”, or “carcinoma” means new and abnormal growth or formation of tissue and/or blood cells in the body of a organism also comprised by the term “neoplasm”. The term “cancer”, “carcinoma” and “neoplasm” include malignancies of the various organ systems for example such affecting brain, eye, lung, breast, thyroid, lymphoid, gastrointestinal, and genito-urinary tract. The conjugates or compositions of the invention are particularly designed to target genes associated with particular diseases or disorders.

### Conjugate

[0033] A conjugate or compound in the context of this application refers to an oligonucleotide, protein and/or peptide, which is for example an immunostimulator, linked with at least one polymer. In a conjugate or compound for example comprising polyalkylen oxide and an oligonucleotide, a protein and/or a peptide, wherein the polyalkylen oxide is linked to the oligonucleotide, protein and/or peptide, the molecular weight of the polyalkylen oxide is at least 200 Da. Preferably, at least one polyalkylen oxide is linked to the 5′-end of the oligonucleotide and/or at least one polyalkylen oxide is linked to the 3′-end of the oligonucleotide, and/or at least one polyalkylen oxide is linked to a phosphate group, a sugar moiety, and/or a base of the oligonucleotide in such conjugates or compounds.

[0034] PEGylating means linking at least one polyethyleneglycol (PEG) to another molecule, in the context of this invention to an oligonucleotide, protein and/or peptide, e.g., an immunostimulator. Preferably the polyethyleneglycol is methylated (mPEG).

### Linkage

[0035] A linkage also referred to as link between two molecules e.g., a polymer and an oligonucleotide, protein and/or a peptide is any kind of covalent connection between at least two molecules. The covalent linkage is preferably supported by additional interactions of the molecules forming the conjugate such as non-covalent, intermolecular forces, e.g., van-der-Waals forces. The molecules of the conjugate, i.e., the oligonucleotide, protein and/or peptide, and the polymer are preferably linked, i.e., connected by linkers.

### Linker

[0036] Linker synonymously also referred to as cross-linker in the context of this invention refers to any chemical substance able to bind at least two molecules, e.g., an oligonucleotide, protein and/or peptide with at least one polymer. Linkers include zero length linkers, homobifunctional crosslinkers, heterobifunctional cross linkers and the like. Different linkers are usable and combinable, respectively, in a conjugate or compound of the invention, i.e., different linkers are directly combined or different linkers are used to link one or more oligonucleotides and/or one or more proteins and/or one or more peptides. Preferably a linker has the function of a spacer. In particular, the polymer is the linker, combining oligonucleotides with each other, or an oligonucleotide with a protein, such as a receptor, and/or a peptide, such as a receptor fragment. The term “linker” further comprises a linker comprising or consisting of a linker and an oligonucleotide, a protein and/or a peptide, or comprises a linker comprising or consisting of a linker and a polyalkylen oxide such as PEG.

### Spacer

[0037] Spacer in the context of this invention is any molecule that connects two or more molecules in a certain distance to each other. In some embodiments the linker used in this invention is also an spacer, but the spacer might be used additionally with a linker in the molecule. In certain embodiments the spacer substitutes at least one nucleotide building block or parts of the nucleotide building block. In other embodiments the spacer substitutes at least one monomer of a polymer block or parts of that monomer. Compounds comprising spacers such as 5′-aminomodifier C3, -C5, -C6, -C7 are also within the scope of this invention. Preferably, the conjugate or compound of the invention comprises one or more spacer, wherein the type of spacers is identical or different. Such a spacer is for example a maleimide spacer, an alkyl spacer, a peptide spacer, a glucuronide spacer, a nonionic or polyionic spacer etc.

### Oligonucleotide

[0038] Size of an oligonucleotide is at least 5 nucleotides, preferably between 5 and 70 nucleotides, preferred between 10 and 60 nucleotides, more preferred between 10 and 40 nucleotides, even more preferred between 12 and 25 nucleotides, and most preferred between 12 and 20 nucleotides. In particular the oligonucleotides comprise 10, 11, 12, 13, 14, 15, 16, 17, 18, 19, 20, 21, 22, 23, 24, or 25 nucleotides. The oligonucleotide is generated in any manner, preferably by chemical synthesis. DNA replication, reverse transcription, or a combination thereof.

[0039] Preferably, the oligonucleotides in the context of the invention comprise any type of oligonucleotide including oligonucleotides having one or more modifications, e.g., an additional functional group for example an amino or a hydroxy group e.g., at one or both ends of the oligonucleotide. These groups allow for example the reaction with a polymer leading to an oligonucleotide polymer conjugate, e.g., a PEGylated oligonucleotide.

[0040] In the context of this invention, the term “oligonucleotide” refers to an oligomer of ribonucleic acid (RNA) or deoxyribonucleic acid (DNA) or mimetics thereof also referred to as nucleotide building block-polymers. The term “oligonucleotide” comprises single and double stranded RNA or DNA. In case of double stranded RNA or DNA the strands are blunt end or with overhanging ends, wherein one strand has an overhang on one side of the other strand or on both ends, or one strand has an overhang on one side and the other strand has an overhang on the other side.

[0041] The term “oligonucleotides” further comprises aptamers and/or spiegelmers. Aptamers are nucleic acid molecules, comprising at least 25 nucleotides, preferably 10 to 100 nucleotides, more preferably 25 to 75 nucleotides, even more preferably 30 to 70 nucleotides, most preferred between 40 to 60 nucleotides, having specific binding affinity to molecules through interactions other than classic Watson-Crick base pairing. Aptamers are engineered through repeated rounds of in vitro selection or equivalently, SELEX (systemic evolution of ligands by exponential enrichment) to bind to various molecular targets such as small molecules, proteins, nucleic acids, even cells, tissues and organisms, preferably with affinities in the nanomolar to the picomolar range. Aptamers are for example engineered completely in a test tube, are readily produced by chemical synthesis, possess desirable storage properties, and elicit little or no immunogenicity in therapeutic applications. Moreover, aptamers are combinable with ribozymes to self-cleave in the presence of their target molecule.

[0042] Spiegelmers are developed on basis of aptamers; they consist of nucleotides having the L-form leading to a high resistance against nucleases. Hence, spiegelmers have all the diversity characteristics of aptamers as well as their binding characteristics, preferably in the low nanomolar to picomolar range, but possess a structure that prevents enzymatic degradation. Aptamers and spiegelmers bind both to extracellular and intracellular molecules such as a receptor or its ligand, to a transcription factor, or a lipid-containing molecule.

[0043] Furthermore, the term “oligonucleotide” comprises RNAi, shRNA, and microRNA (miRNA). RNAi is a mechanism for RNA-guided regulation of gene expression in which double-stranded ribonucleic acid inhibits preferably the expression of genes with complementary nucleotide sequences. The RNAi pathway is initiated by the enzyme dicer, which cleaves double-stranded RNA to short double-stranded fragments preferably of 15 to 35 base pairs, more preferably of 20 to 30 base pairs, and most preferably 20 to 25 base pairs. One of the two strands of each fragment, which is the “guide strand”, is incorporated into the RNA-induced silencing complex (RISC) and base-pairs with a complementary sequence. The most-well studied effect of RNAi is post-transcriptional gene silencing, which occurs when the guide strand base pairs with a mRNA and induces degradation of the mRNA for example by argonaute, a catalytic component of the RISC complex. The short fragments are known as small interfering or silencing RNA (siRNA), which are preferably perfectly complementary to the gene which is to be suppressed. In addition to their role in RNAi pathway, siRNA also act in RNAi-related pathways, e.g., as an antiviral mechanism or in shaping the chromatin structure of a genome. Similar to siRNA, microRNA (miRNA), which are single-stranded RNA molecules of 15 to 30 nucleotides, preferably 20 to 30 nucleotides, and most preferably 21 to 23 nucleotides, regulate preferably gene expression. miRNA is encoded by genes that are transcribed from DNA, but not translated into protein (non-coding RNA). Instead the miRNA is processed from primary transcripts known as pre-miRNA preferably to short stem-loop structures such as pre-miRNA and finally to functional miRNA. A further type of RNA preferably involved in gene silencing is short hairpin RNA (shRNA). shRNA is RNA which makes a tight hairpin turn that is preferably suitable to silence gene expression via RNAi. shRNA uses a vector introduced into cells and utilizes a promoter, preferably the U6 promoter, to ensure that the shRNA is expressed. The vector is preferably passed on to daughter cells, allowing the gene silencing to be inherited. The shRNA hairpin structure is preferably cleaved by the cellular machinery preferably into siRNA, which is then bind to RISC and starts the mechanism as described above.

[0044] Additionally, the term oligonucleotide comprises CpG oligonucleotides. CpG motifs induce Toll-like receptor mediated immune response by simulating bacterial DNA. The CpG oligonucleotide preferably activates immune cells such as dendritic cells and B lymphocytes, and stimulates NF-κB. CpG oligonucleotides are in general not a target sequence specific approach.

[0045] Moreover, the term oligonucleotide comprises a decoy oligonucleotide, also known as “decoy”, which is preferably a double-strand oligonucleotide bearing a consensus binding sequence for example of a specific transcription factor for manipulating gene expression.

[0046] The oligonucleotides of the present invention preferably hybridize with mRNA of a molecule negatively influencing a physiological and/or biochemical effect in a cell or hybridize with mRNA of the receptor of the molecule. More preferably, the oligonucleotides of the invention hybridize with mRNA of TGF-beta1, TGF-beta2, TGF-beta3, VEGF, IL-10, c-jun, c-fos, Her-2. MIA, and/or its receptor.

### Nucleotide Building Block—Modification

[0047] Oligonucleotides comprise nucleotide building blocks composed of base, sugar, and phosphate moiety. Oligonucleotides include oligonucleotides having non-naturally occurring oligonucleotide building blocks with similar function. Naturally occurring nucleotides as well as non-naturally occurring nucleotides, modifications of these nucleotides at the base, the sugar or the backbone as well as spacers instead of a at least one nucleotide are also referred to as nucleotide building block. Modifications of an oligonucleotide are for example phosphorothioate, methylphosphonate, phosphoramidate, or 2′-modifications of the sugar (e.g., 2′-O-methyl oligonucleotide, 2′-O-methoxy-ethyl oligonucleotide, or 2′-deoxy-2′-fluoro oligonucleotide).

[0048] The oligonucleotide preferably comprises at least 5 nucleotide building blocks, preferably 5 to 120 nucleotide building blocks, more preferably 8 to 30 nucleotide building blocks, even more preferably 10 to 28 nucleotide building blocks, even more preferred 12 to 26 nucleotide building blocks, most preferred 10, 11, 12, 13, 14, 15, 16, 17, 18, 19, 20, 21, 22, 23, 24, 25, or 26 nucleotide building blocks.

[0049] The term nucleotide building block comprises nucleotides composed of naturally-occurring nucleobases, sugars and covalent internucleoside (backbone) linkages, each of these also referred to as portions, as well as oligonucleotides having non-naturally-occurring portions which function similarly, e.g. hybridizing with the same mRNA of a selected target. In one embodiment the base is modified or substituted by a similar molecule. Similar bases are those molecules that are also able to support the hybridization to the mRNA or at least do not affect the hybridization in a negative way. In some embodiments at least one base portion is substituted with a spacer.

[0050] In other embodiments the sugar moiety of the nucleotide building block is modified or substituted by another group, structure, or moiety. Examples for sugars are arabinose, xylose, lyxose, allose, altrose, glucose, mannose, gulose, idose, galactose, talose or stabilized modifications of those sugars. In some embodiments the sugar is substituted by a spacer.

[0051] In other embodiments the internucleoside linkage, also referred to as linkage between two nucleotide building blocks is not a phosphorodiester but another group, structure, or moiety.

[0052] Such oligonucleotides with at least one modified nucleotide building block are often preferred over native forms because of desirable properties such as enhanced cellular uptake, enhanced affinity for nucleic acid target, increased stability in the presence of nucleases and/or enhanced therapeutic effectiveness.

[0053] Oligonucleotides, having a modified nucleotide building block, further comprise for example peptide nucleic acid (PNA), locked nucleic acid (LNA), and morpholinos as shown in the following:

[chemical structure]

[0054] PNA is a chemical similar to DNA and RNA, and is generally artificially synthesized. The PNA's backbone is composed for example of repeating N-(2-aminoethyl)-glycine units linked by peptide bonds. The various purine and pyrimidine bases are preferably linked to the backbone by methylene carbonyl bonds. Since the backbone of PNA contains no charged phosphate groups, the binding between PNA/DNA strands is in general stronger than between DNA/DNA.

[0055] LNA is a modified RNA, wherein the ribose moiety of an LNA nucleotide is modified with an extra bridge connecting the 2′ and 4′ carbons. The bridge “locks” the ribose in the 3′-endo structural conformation, which is often found in the A-form of DNA or RNA. LNA is combinable with DNA or RNA bases in an oligonucleotide.

[0056] Morpholino oligonucleotides are an antisense technology used to block access of other molecules to specific sequences with nucleic acid. Morpholinos block small (about 25 base) regions of the base-pairing surface of RNA or DNA.

### Protein

[0057] Proteins are consisting of at least 120 amino acids, wherein the term “amino acid” does not only comprise naturally occurring amino acids, but also chemically modified amino acids. The amino acids are either isolated from natural sources or biotechnologically modified microorganisms. The proteins are either isolated or synthesized for example via the Merrifield method. Such proteins are for example enzymes, antibodies or receptors or fragments thereof.

[0058] The term protein according to the present invention comprises glycoproteins, which are proteins that contain oligosaccharide chains (glycans) covalently attached to their polypeptide backbones. Preferably, the oligosaccharide is connected to the amide nitrogen of the side chain of Asp (N-glycosylation), or to the hydroxyloxygen of the side chain of hydroxylysine, hydroxyproline, serine, or threonine (O-glycosylation).

### Peptide

[0059] The term “peptide” comprises dipeptides, oligopeptides and polypeptides. Dipeptides, comprising two amino acids, are for example Carnosin, Anserin, Homoanserin, Kyotorphin, Balenin, Aspartam, Glorin, Barettin, or Pseudoprolin. Oligopeptides comprise only a low number of amino acids, e.g., 3 to 15 amino acids, preferably 5 to 15 amino acids, and more preferably 8 to 15 amino acids. Preferably oligopeptides comprise 3, 4, 5, 6, 7, 8, 9, 10, 11, 12, 13, 14, or 15 amino acids. Polypeptides comprise between 15 and 120 amino acids, preferably between 30 and 100 amino acids, more preferably between 60 and 120 amino acids, most preferably between 90 and 100 amino acids. In particular, peptides comprise, 15, 20, 25, 30, 35, 40, 45, 50, 55, 60, 65, 70, 75, 80, 85, 90, 95, 100, 110, or 120 amino acids. Such proteins are for example enzymes, antibodies or receptors or fragments thereof.

[0060] Aptamers are as above mentioned nucleic acid molecules. Alternatively, aptamers are peptide or protein molecules. A typical aptamer has at least 5 kDa, preferably 5 to 25 kDa, more preferably 10 to 20 kDa, and most preferably 10 to 15 kDa in size. Aptamers are preferably characterized by high specificity and affinity, biological efficacy, and excellent pharmacokinetic properties. Aptamers are for example suitable as molecular “chaperones”, increasing the specificity of another molecule to a given target by linking the molecule to an aptamer with high binding affinity to a target. Such molecule is for example a cytotoxic agent, e.g., chemotoxins such as tubulin stabilizers/destabilizers, anti-metabolites, purine synthesis inhibitors, nucleoside analogs, and DNA-modifying agents, a toxin, e.g., a radioisotope, receptor tyrosine kinases, EGFR, Her2 new, PSMA, and Muc1, or a chemotherapeutic agent.

### Protecting Group (Protective Group)

[0061] In preferred embodiments of the invention one or more protecting groups, also called protection groups, are used in the production of the conjugate or compound. In general, protecting groups render chemical functionalities inert to specific reaction conditions and are appended to and/or removed from such functionalities in a molecule without substantially damaging the remainder of the molecule. The term “protected” means that the indicated moiety has a protecting group appended thereon.

[0062] Hydroxy protecting groups are for example t-butyl, t-butoxymethyl, methoxymethyl, tetrahydropyranyl, 1-ethoxyethyl, I-(2-chloroethoxy)ethyl, 2-trimethylsilyl ethyl, p-chlorophenyl, 2,4-dinitrophenyl, benzyl, 2,6-dichlorobenzyl, diphenylmethyl, p, p′-dinitrobenzylhydryl, triphenylmethyl, trimethylsilyl, triethylsilyl, t-butyldimethylsilyl, t-butyldiphenylsilyl, triphenylsilyl, benzoylformate, acetate, chloroacetate, trichloroacetate, trifluoroacetate, pivaloate, benzoate, p-phenylbenzoate, 9-fluorenylmethyl carbonate, mesylate and tosylate.

[0063] Amino protecting groups are for example monomethoxytrityl (MMT), 2-trimethylsilylethoxycarbonyl (Teoc), 1-methyl-1-(4-biphenyl)ethoxycarbonyl (Bpoc), t-butoxycarbonyl (BOC), allyloxycarbonyl (Alloc), 9-fluorenylmethyloxycarbonyl (Fmoc), benzyloxycarbonyl (Cbz); amide protecting groups such as formyl, acetyl, trihaloacetyl, benzoyl, and nitrophenylacetyl; sulfonamide protecting groups such as 2-nitrobenzenesulfonyl, or imine and cyclic imide protecting groups such as phthalimido and dithiasuccinoyl.

[0064] Carbonyl protecting groups are for example acetals, ketals, acylals, or dithianes. Carboxylic acid protecting groups are for example methyl esters, benzyl esters, tert-butyl esters, or silyl esters.

[0065] Equivalents of the protecting groups such as hydroxy protecting groups, amino protecting groups, carbonyl protecting groups, carboxylic acid protecting groups or amino protecting groups are also encompassed by the conjugates or compounds and the methods of their production.

[0066] Moreover, the production of oligonucleotide, protein and/or peptide conjugates according to the invention comprises orthogonal protection, which is a strategy allowing the deprotection of multiple protective groups one at the time each with a dedicated set of reaction conditions without affecting the other. In particular, orthogonal protection is used for the production of proteins and peptides as well as their conjugates of the invention. Preferably, orthogonal protection is used for high selective conjugation of an oligonucleotide, a protein and/or a peptide with a polymer, in particular polyalkylen oxide such as PEG.

[0067] Depending on the protecting group for example more acidic or more basic conditions allow to remove the protecting group from the oligonucleotide, protein or peptide.

### Solid Phase

[0068] In the context of this invention a solid phase is any inert material on which the synthesis of an oligonucleotide, protein, peptides, of any polymer if performable. A preferred embodiment of a solid phase is a controlled pore glass. For example controlled means that reactive groups of the solid phase are neutralized.

### Immunostimulator

[0069] An immunostimulator according to this invention is any substance inducing the function of immune cells and/or the immune system to enhanced abilities directly or indirectly reducing or inhibiting the tumor cell growth and/or inducing cell death of unwanted neoplasms in a pharmaceutical acceptable carrier.

[0070] In one embodiment the oligonucleotide, the protein and/or the peptide such as an immunostimulator is selected from the group of chemokines, including but not limited to lymphotactin, interleukin 1, interleukin 2, interleukin 6, interleukin 12, interferon gamma, and/or immune cell attracting substances.

[0071] In yet another embodiment the oligonucleotide, the protein and/or the peptide such as an immunostimulator is selected from the group of viruses and/or parts of viruses, including retroviruses, adenoviruses, papillomaviruses. Epstein-Barr-viruses and viruses that are non-pathogenic including Newcastle-Disease virus, Cow-pox-virus.

[0072] In another embodiment the oligonucleotide, the protein and/or the peptide, e.g., an immunostimulator is selected from the group of autologous, heterologous MHC-Molecules, molecules involved in antigen processing, molecules involved in antigen presentation, molecules involved in mediating immune cell effects, molecules involved in mediating immune cell cytotoxic effects, molecules involved in antigen transportation, co-stimulatory molecules, peptides enhancing recognition by immune cells and/or cytotoxic effects of immune cells.

[0073] In yet another embodiment the protein or peptide, for example an immunostimulator is a protein or peptide enhancing the recognition of unwanted neoplasms by immune cells and/or cytotoxic effects of immune cells containing one or more mutations and/or amino acid substitutions of the ras proteins, the p53 protein, the EGF-receptor protein, fusion peptides and/or fusion proteins, the retinoblastoma protein, proteins coded by oncogenes and/or protooncogenes and/or proteins coded by anti-oncogenes and/or tumor suppressor genes.

[0074] In yet another embodiment the protein or peptide such as an immunostimulator is a protein or peptide enhancing the recognition of unwanted neoplasms by immune cells and/or cytotoxic effects of immune cells containing one or more mutations and/or amino acid substitutions caused by gene rearrangements and/or gene translocations.

[0075] In yet another embodiment the protein or peptide such as an immunostimulator is a protein or peptide enhancing the recognition of unwanted neoplasm by immune cells and/or cytotoxic effects of immune cells derived from proteins differing in the target cell by one or more amino acids from the proteins expressed by other cells in the same organism.

[0076] In yet another preferred embodiment the protein or peptide such as an immunostimulator is a protein or peptide enhancing the recognition of unwanted neoplasm by immune cells and/or cytotoxic effects of immune cells derived from viral antigens and/or coded by viral nucleic acids.

[0077] In yet another embodiment the protein or peptide such as an immunostimulator is a protein or peptide derived from proteins expressed in a diseased organ but not in the nervous system, muscle, hematopoetic system or other organs essential for survival. Diseased organs are e.g. prostate, ovary, breast, melanin producing cells and the like.

[0078] In yet another embodiment the protein or peptide, e.g., an immunostimulator is a protein or peptide containing one or more amino acids differing between a protein in the target cell from the other cells within an organism, tumor cell extracts, tumor cell lysates and/or adjuvants.

[0079] In yet another embodiment the immunostimulator is a fusion cell of a dendritic and a tumor cell or is a dendritic cell. These fusion cells are hybridoma cells derived from a mixture of dendritic cells and tumor cells. Dendritic cells are generated e.g. by treatment of PBMC with GM-CSF and IL-4 or a mixture of GM-CSF, IL-4 and IFN-γ or FLT-3 ligand. Fusion of dendritic cells with tumor cells can be achieved e.g. using PEG (polyethyleneglycol) or electrofusion (Hayashi, T., et al. 2002, Parkhurst, M. R. 2003, Phan, V. 2003).

[0080] In yet another preferred embodiment the protein and/or the peptide for example an immunostimulator is an antagonist of factors negatively influencing the function of the immune system. These factors are e.g. TGF-beta1, -2, or -3 (transforming growth factor beta1, -2, or -3), VEGF (vascular endothelial growth factor), PGE₂ (prostaglandin E₂), IL-10 (interleukin 10), or MIA, or fragments thereof.

[0081] In yet another embodiment the oligonucleotide, the protein and/or the peptide such as an immunostimulator is a vaccine.

[0082] Vaccines according to this invention comprise but are not limited to substance in a pharmaceutical acceptable carrier selected from the group of whole (irradiated) tumor cells, ASI (active specific immunization) with e.g. Newcastle Disease Virus (NDV) modified tumor cell vaccine (Schneider, T. et al. 2001), tumor cell lysates.

[0083] In one preferred embodiment the vaccines are peptides combined with cytokines (e.g. IL-2, IL-12, GM-CSF) or peptides combined with adjuvants (e.g. incomplete Freund's adjuvant, QS21).

[0084] In yet another embodiment of vaccination a recombinant virus construct that encodes carcinoma antigen(s) is part of e.g. adenovirus, vaccinia, fowlpox and/or avipox.

[0085] In yet another embodiment the vaccine is naked DNA or RNA encoding carcinoma antigen(s).

[0086] In yet another embodiment the vaccine comprises or consists of dendritic cells, dendritic cells loaded with peptides derived from carcinoma antigens, dendritic cells transfected with recombinant viruses or RNA. DNA and/or cDNA encoding different tumor antigens, dendritic cells pulsed with tumor lysates and/or dendritic cells fused with whole tumor cells. For further vaccines see also Jager, E. et al. 2003.

[0087] In a preferred embodiment of this invention the oligonucleotide, the protein and/or the peptide for example an immunostimulator is an antagonist of factors negatively influencing the function of the immune system.

[0088] An antagonist as used herein is any substance inhibiting any physiological and/or biochemical effect, for example inhibiting the production of e.g. a cytokine and/or the effect of cytokines. Examples for cytokines negatively influencing the immune systems are e.g. TGF-beta such as TGF-beta1. TGF-beta2, or TGF-beta3 VEGF, IL-10, PGE-E₂, or MIA. The inhibition in one embodiment works by binding the cytokine to a binding protein, to a receptor or to a part of this receptor, by binding the cytokine with an antibody, a low molecular substance inhibiting the cytokine or its production, or by inhibiting the signal pathway of said cytokine, e.g. by inhibiting the receptors of these cytokines or any other link downstream in the activation cascade of cytokines.

[0089] TGF-beta (transforming growth factor beta) in the context of this invention comprises all subclasses of TGF-beta, preferred subclasses are TGF-beta 1, TGF-beta 2, and TGF-beta 3.

[0090] More details are given for example for the preferred embodiment of TGF-beta antagonists such as TGF-beta1, TFG-beta2, or TGF-beta3 antagonists, which are transferable to the cytokines described above as well.

[0091] Preferably, antagonist of the immune system as used herein is any substance or method inhibiting the activity of the immune system.

[0092] “Low molecular substances” or “small molecules” herein comprise substances with a molecular weight of less than about 10 kg/mol and more than about 1 g/mol, preferably less than about 1 kg/mol of organic or inorganic origin.

[0093] In a preferred embodiment the immunostimulator of the pharmaceutical composition of this invention is a TGF-beta antagonist, preferably a TGF-beta1. TGF-beta2, or TGF-beta3 antagonist.

[0094] In the context of this invention a TGF-beta antagonist is any oligonucleotide, protein and/or peptide or any substance inhibiting the function of TGF-beta in the meaning that any effect that is induced by TGF-beta is inhibited.

[0095] In preferred embodiments the TGF-beta antagonist is an oligonucleotide, protein and/or peptide or another substance inhibiting the production of TGF-beta, is an oligonucleotide, protein and/or peptide or another substance binding TGF-beta and/or is an oligonucleotide, protein and/or peptide or another substance inhibiting the function of TGF-beta downstream its activation cascade. TGF-beta antagonists are for example anti-TGF-beta antibodies, small molecule inhibitors of TGF-beta, or Smad inhibitors as described in Wojtowicz-Praga (2003) herein incorporated by reference.

[0096] Examples for TGF-beta antagonists are given in Example 15.

[0097] In one embodiment of TGF-beta antagonists or inhibitors inhibiting the production of TGF-beta, the antagonist or inhibitor is an oligonucleotide and/or its active derivative hybridising preferably with a specific area of the messenger RNA (mRNA) of TGF-beta and/or the DNA encoding TGF-beta and thereby inhibiting the production of TGF-beta.

[0098] In yet another embodiment TGF-beta antagonists or inhibitors, e.g., TGF-beta1. TGF-beta2, or TGF-beta3 antagonists or inhibitors, are receptors and/or parts of it binding TGF-beta and in that way inhibiting the function of TGF-beta.

[0099] In yet another embodiment the TGF-beta antagonist or inhibitors is an antibody and/or parts of it binding TGF-beta and by this inhibiting the function of TGF-beta, in particular TGF-beta1. TGF-beta2, or TGF-beta3, or fragments thereof. Those antibodies are commercially available, see e.g. R & D Systems, Inc. The production of such antibodies is well known in the art. Animals for example chicken, mice, rabbits, goats, are immunized with purified human TGF-beta, particularly TGF-beta1. TGF-beta2, or TGF-beta3. After immunization, IgY is purified for example via affinity chromatography as described for example by Cooper, N. M. (1995). In yet other embodiments the TGF-beta antibodies are modified, e.g., biotinylated.

[0100] In a more preferred embodiment the TGF-beta antibodies are humanized antibodies. For example humanized TGF-beta1, and TGF-beta2 antibodies as described in Carrington et al. (2000 and 2006).

[0101] In yet another embodiment the TGF-beta antagonist or inhibitors is an oligonucleotide, a protein and/or a peptide binding to TGF-beta, and by this inhibiting the function of TGF-beta. Preferred embodiments of the peptides are e.g. latency-associated peptides, which are suitable to inhibit all isoforms of TGF-beta for example TGF-beta 1, TGF-beta 2 and TGF-beta 3.

[0102] In another embodiment the TGF-beta inhibitor is an oligonucleotide, a protein, a peptide or a small molecule inhibiting the function of the TGF-beta receptor, acting extracellularly or intracellularly.

[0103] In yet other embodiments the TGF-beta antagonists or inhibitors comprise oligonucleotides, proteins, peptides, antibodies and/or small molecules, which inhibit the TGF-beta activity by inhibiting any link downstream of the TGF-beta cascade of activation.

[0104] In a preferred embodiment of this invention the antagonist or inhibitor of a peptide, cytokine and/or receptor is an oligonucleotide according to this invention.

[0105] In yet another embodiment the antagonist or inhibitor inhibiting the production of TGF-beta is for example a peptide, a peptide of less than 100 kg/mol, a peptide being part of TGF-beta, a protein, a protein that is not an antibody, and/or a small molecule, e.g. tranilast (N-[3,4-dimethoxycinnamoyl]-anthranilic acid) (Wilkenson, K. A. 2000).

[0106] In one embodiment the protein or peptide being part of TGF-beta is an amino acid sequence of TGF-beta 1, TGF-beta2 and/or TGF-beta3 which are published for example in Mittl (1996) herein incorporated by reference.

[0107] In one preferred embodiment a peptide comprises the 112 amino acids starting counting from the end of the TGF-beta1. TGF-beta2 or TGF-beta 3 protein, i.e., the last 112 amino acids of one of these proteins. The start of those peptides is after the RXXR motif ending 113 amino acids before the end of the TGF-beta1, TGF-beta2 or TGF-beta3 protein, wherein R is the amino acid arginin, and XX represents any amino acid or is even no amino acid.

[0108] In yet other embodiments a peptide being part of TGF-beta comprises or is part of one or more of the sequences presented in example 9, comprising one to all amino acids of this peptide. In other embodiments a preferred peptide, e.g., a TGF-beta peptide, comprises or consists of about 1-100 amino acids, about 2-50 amino acids, about 3-30 amino acids or about 5-20 amino acids. In further preferred embodiments the peptide is part of any of the amino acid sequences of a TGF-beta protein as described above comprising or consisting of about 1-50 amino acids, about 1-40, about 2-30, about 3-25, about 4-18, about 5-15 or about 6-12 amino acids.

[0109] In yet other embodiments preferred amino acid sequences, i.e., peptides are those presented in example 9 for TGF-beta1. TGF-beta2 and TGF-beta3 with the respective numbers 1-21.

[0110] Amino acids replaced conservatively, also referred to as conservative analogs or active derivatives of peptides in the context of this invention, means replacing at least one amino acid of a peptide or protein. Preferably at least one acid amino acid (e.g., glutaminic acid (E), asparaginic acid (D)) is replaced by the respective other amino acid, accordingly at least one basic amino acids is replaced by another basic amino acid, at least one amino acid with a polar group (—OH, —SH, —CONH₂) is replaced by another amino acid with a polar group and/or amino acids with pure carbon side chains such as aliphatic side chains are replaced by another amino acid with pure carbon side chains. Peptides and/or proteins conservatively replaced with amino acids are still in the scope of this invention.

[0111] In yet other embodiments of the proteins or peptides of the invention at least one of the basic amino acids selected from the group of histidine (H), lysine (K) and arginine (R) is substituted by another basic amino acid selected from this group without loosing its TGF-beta antagonizing effects.

[0112] In yet other embodiments of the proteins or peptides of the invention at least one of the acid amino acids selected from the group of glutaminic acid (E) and asparaginic acid (D) is substituted by its counterpart of this group without loosing its TGF-beta antagonizing effects.

[0113] The peptides that are part of TGF-beta and wherein some amino acids are replaced conservatively compared to their sequences presented in example 9 are also referred to as analogs of TGF-beta1, TGF-beta2 and/or TGF-beta3.

[0114] In some embodiments in the analogs of TGF beta1, TGF-beta2 or TGF-beta3 1 to about 30%, about 2% to about 20%, about 3% to about 15%, 4% to about 12% or about 5% to about 10% of the amino acids are replaced conservatively.

[0115] In another embodiment the oligonucleotides, proteins and/or peptides of the invention are either used alone or in combination with a chemotherapeutic agent. In yet another embodiment the oligonucleotides, proteins and/or peptides are used for preparing a pharmaceutical composition with a pharmaceutically acceptable carrier. In yet another embodiment the oligonucleotides, proteins and/or peptides are comprised by a pharmaceutical composition for the treatment of neoplasms or solid tumors and in yet another embodiment these peptides are used for a method treating neoplasms or solid tumors according to this invention, more preferred glioma, astrocytoma and/or glioblastoma.

[0116] In one embodiment the oligonucleotide, the protein and/or the peptide such as an immunostimulator is an oligonucleotide, protein and/or peptide, that is linked with at least one polymer, more preferred polyalkylene oxide, most preferred with polyethyleneglycol.

[0117] Yet another aspect of this invention is a conjugate and compound, respectively, comprising an oligonucleotide, a protein and/or a peptide linked with at least one polymer as described herein.

[0118] The conjugation with the polymer is anywhere within the molecule, i.e., the oligonucleotide, the protein or the peptide. With regard to the oligonucleotide, the linkage is preferably at the 3′ and/or 5′ end of the oligonucleotide. In a preferred embodiment, polymers of same or different type and/or molecular weight are linked to the 3′ or/and to the 5′ end of the oligonucleotide. The term 3′ and 5′ end, respectively, refers to the carbon atom of the sugar moiety of the oligonucleotide or the nucleotide building block. If the sugar is substituted by another molecule, this term is used in an analogous way, which means that it is looked upon the oligonucleotide or the nucleotide building block in that way that there would be a sugar moiety. Preferably, the polymer for example the polyalkylen oxide such as PEG linked to the 5′-end of the oligonucleotide has the 1.5- to 100-fold molecular weight of the polyalkylen oxide linked to the 3′-end of the oligonucleotide, or the polyalkylen oxide linked to the 3′-end of the oligonucleotide has the 1.5- to 100-fold molecular weight of the polyalkylen oxide linked to the 5′-end of the oligonucleotide, or the polyalkylen oxide linked to the 5′-end or 3′-end of the oligonucleotide has the 1.5- to 100-fold molecular weight of the polyalkylen oxide linked to the phosphate group, the sugar moiety and/or any base of the oligonucleotide, or the polyalkylen oxide linked to the phosphate group, the sugar moiety and/or any base of the oligonucleotide has the 1.5- to 100-fold molecular weight of the polyalkylen oxide linked to the 5′-end or 3′-end of the oligonucleotide. More preferred, the molecular weight of the polymer for example polyalkylen oxide such as PEG, which is linked to the 5′-end of the oligonucleotide is 200, 300, 400, 500, 600, 700, 800, 900, 1000, 1250, 1500, 1750, 2000, 2250, 2500, 2750, 3000, 3250, 3500, 3750, 4000, 4250, 4500 or 4750, 5000, 10000, 20000, 50000 or 1000000 Da and the molecular weight of the polyalkylen oxide linked to the 3′-end of the oligonucleotide is 200, 300, 400, 500, 600, 700, 800, 900, 1000, 1250, 1500, 1750, 2000, 2250, 2500, 2750, 3000, 3250, 3500, 3750, 4000, 4250, 4500 or 4750, 5000, 10000, 20000, 50000 or 1000000 Da, or the molecular weight of the polyalkylen oxide linked to the 3′-end of the oligonucleotide is 200, 300, 400, 500, 600, 700, 800, 900, 1000, 1250, 1500, 1750, 2000, 2250, 2500, 2750, 3000, 3250, 3500, 3750, 4000, 4250, 4500 or 4750, 5000, 10000, 20000, 50000 or 1000000 Da and the molecular weight of the polyalkylen oxide linked to the 5′-end of the oligonucleotide is 200, 300, 400, 500, 600, 700, 800, 900, 1000, 1250, 1500, 1750, 2000, 2250, 2500, 2750, 3000, 3250, 3500, 3750, 4000, 4250, 4500 or 4750, 5000, 10000, 20000, 50000 or 1000000 Da, or the molecular weight of the polyalkylen oxide linked to the 5′-end and/or the 3′-end of the oligonucleotide is 200, 300, 400, 500, 600, 700, 800, 900, 1000, 1250, 1500, 1750, 2000, 2250, 2500, 2750, 3000, 3250, 3500, 3750, 4000, 4250, 4500 or 4750, 5000, 10000, 20000, 50000 or 1000000 Da and the molecular weight of the polyalkylen oxide linked to the phosphate group, the sugar moiety and/or any base of the oligonucleotide is 200, 300, 400, 500, 600, 700, 800, 900, 1000, 1250, 1500, 1750, 2000, 2250, 2500, 2750, 3000, 3250, 3500, 3750, 4000, 4250, 4500 or 4750, 5000, 10000, 20000, 50000 or 1000000 Da, or the molecular weight of the polyalkylen oxide linked to the phosphate group, the sugar moiety and/or any base is 200, 300, 400, 500, 600, 700, 800, 900, 1000, 1250, 1500, 1750, 2000, 2250, 2500, 2750, 3000, 3250, 3500, 3750, 4000, 4250, 4500 or 4750, 5000, 10000, 20000, 50000 or 1000000 Da and the molecular weight of the polyalkylen oxide linked to the 5′-end and/or the 3′-end of the oligonucleotide is 200, 300, 400, 500, 600, 700, 800, 900, 1000, 1250, 1500, 1750, 2000, 2250, 2500, 2750, 3000, 3250, 3500, 3750, 4000, 4250, 4500 or 4750, 5000, 10000, 20000, 50000 or 1000000 Da.

[0119] Further possibilities for linking the at least one polymer with the oligonucleotide are for example linking it to the phosphorodiester group, to any other O-atom of the sugar moiety or to an active group of the respective substitute. In other embodiments the polymer is linked with an active group of the base, its modification, its substitute or with a linker and/or a spacer. The polymer can also be linked to a spacer within the compound.

[0120] Preferably, one conjugate or compound comprises one or more polymers linked to the oligonucleotide, protein and/or peptide. The linkage of several polymers induces for example better pharmacological activity, less side effects, better cellular uptake, improved hybridization, improved halflife time, and/or reduced toxicity.

[0121] The oligonucleotide or nucleotide building block linked with the at least one polymer comprises or consists of about 8 to about 30 nucleotides. Preferred oligonucleotides are oligonucleotides that hybridize with mRNA coding for molecules preferably relevant in the process of inhibiting the synthesis and/or the function of molecules suppressing and/or downregulating and/or negatively affecting cellular processes, in particular the immune response.

[0122] In preferred embodiments these molecules are TGF-beta1, TGF-beta2, TGF-beta3, VEGF, interleukin-10, c-jun, c-fos, c-erbB2, their respective receptors and/or the prostaglandin E2 receptor. Further preferred embodiments of oligonucleotides are given in the sequence listing, in examples 6 and 7 or are oligonucleotides published in WO 94/25588, WO 95/17507, WO 95/02051, WO 98/33904, WO 99/63975, WO 01/68146, WO 01/68122, WO 03/06445, WO 2005/014812, WO 2005/059133, WO 2005/084712 herein incorporated by reference.

[0123] Preferred oligonucleotides that are linked with at least one polymer comprise or consist of at least one of SEQ ID NO 1 to 435, or comprise or consist of at least one of the sequences of examples 7 and 8.

[0124] Especially preferred are SEQ ID NO. 1, 2, 3, 28 and 37. Mostly preferred are the oligonucleotides comprising or consisting of SEQ ID No.: 1 (CGGCATGTCTATTTTGTA) and/or SEQ ID No.: 28 (CTGATGTGTTGAAGAACA).

[0125] In yet other embodiments the oligonucleotide is a “chimeric” oligonucleotide. In the context of this invention chimeric oligonucleotides are oligonucleotides, which contain at least one chemically region wherein at least one portion of the nucleotide building block is modified. These oligonucleotides show for example increased resistance to nuclease degradation, increased cellular uptake, and/or increased binding affinity for the target nucleic acid.

[0126] In one embodiment the oligonucleotide or the nucleotide building block includes for example sugar moieties that are covalently attached to low molecular weight organic groups other than a hydroxyl group at the 3′ and/or 2′ position and other than a phosphate group at the 5′ position. Thus modified nucleic acids may include a 2′-O-alkylated sugar more preferred ribose group. The alkyl group is described as R1-R2. R1 is an alkyl with 1 to 20 carbon atoms and R2 is O-alkyl, S-alkyl, NH-alkyl, N-dialkyl, O-aryl, S-aryl, NH-aryl, O-aralkyl, S-aralkyl, NH-aralkyl. Preferred embodiments of 2′-O-alkyl groups are methoxy-, ethoxy-, propyloxy-, isopropyloxy-, methoxy-ethoxy or any other combined alkyl groups.

[0127] An additional region of the oligonucleotide or the nucleotide building block may serve as a substrate for enzymes capable of cleaving RNA:DNA or RNA:RNA hybrids. By way of example, RNase H is a cellular endonuclease which cleaves the RNA strand of an RNA:DNA duplex. Activation of RNase H. therefore, results in cleavage of the RNA target, thereby greatly enhancing the efficiency of oligonucleotide inhibition of gene expression. Cleavage of the RNA target can be routinely detected by gel electrophoresis and, if necessary, associated nucleic acid hybridization techniques known in the art.

[0128] Chimeric antisense conjugates or compounds of the invention may be formed as composite structures of two or more oligonucleotides, modified oligonucleotides, oligonucleosides and/or oligonucleotide mimetics as described above. Such compounds have for example been referred to in the art as hybrids or gapmers. Representative United States patents that teach the preparation of such hybrid structures include, but are not limited to, U.S. Pat. Nos. 5,013,830; 5,149,797; 5,220,007; 5,256,775; 5,366,878; 5,403,711; 5,491,133; 5,565,350; 5,623,065; 5,652,355; 5,652,356; and 5,700,922, each of which is herein incorporated by reference.

[0129] The nucleic acid molecules of the invention may include naturally-occurring or synthetic purine or pyrimidine heterocyclic bases. Purine or pyrimidine heterocyclic bases include, but are not limited to adenine, guanine, cytosine, thymidine, uracil, and inosine. Other representative heterocyclic bases are disclosed in U.S. Pat. No. 3,687,808. The terms “purines” or “pyrimidines” or “bases” are used herein to refer to both naturally-occurring or synthetic purines, pyrimidines or bases.

[0130] In an other embodiment the oligonucleotides include non-ionic DNA analogs, such as alkyl- and arylphosphates (in which the charged phosphonate oxygen is replaced by an alkyl or aryl group), phosphodiester and alkylphosphotriesters, in which the charged oxygen moiety is alkylated. Nucleic acids which contain diol, such as tetraethyleneglycol or hexaethyleneglycol, at either or both termini have also been shown to be substantially resistant to nuclease degradation.

[0131] In yet another embodiment the base units are maintained for hybridization with an appropriate nucleic acid target compound. One such oligomeric compound, an oligonucleotide that has been shown to have excellent hybridization properties, is referred to as a peptide nucleic acid (PNA). In PNA compounds, the sugar-backbone of an oligonucleotide is replaced with an amide containing backbone, in particular an aminoethylglycine backbone. The nucleobases are bound directly or indirectly to azo nitrogen atoms of the amide portion of the backbone. Representative United States patents that teach the preparation of PNA compounds include, but are not limited to, U.S. Pat. Nos. 5,539,082, 5,714,331, and 5,719,262, each of which is herein incorporated by reference. Further teaching of PNA compounds can be found in Nielsen et al. (1994).

[0132] In other embodiments the deoxyribose phosphate backbone is replaced with an achiral polyamide backbone. For example thymine-linked aminothioglycol units are prepared. The hybrids of these oligonucleotides have a very high stability compared to underivated oligonucleotides. For more details see Nielsen (1991).

[0133] In some embodiments at least one oligonucleotide or nucleotide building block is modified as described in one of the modifications above. The modification can either cover the oligonucleotide or nucleotide building block continuously or irregularly.

[0134] In yet another embodiment at least two modifications as described above are combined within one oligonucleotide.

[0135] The invention comprises any combination of polymers and linkers, spacer, oligonucleotide, protein, and/or peptide. In preferred embodiments the conjugate or compound comprises or consists of one or more than one oligonucleotide, protein and/or peptide, or one or more oligonucleotides combined with one or more proteins and/or peptides, which are optionally linked via at least one linker and/or spacer. In particular, a conjugate according to the invention comprises or consists of one or more polymers and one or more oligonucleotides, one or more proteins, one or more peptides, one or more linker and/or one or more spacer. The conjugate preferably comprises or consists of an oligonucleotide and a polymer, or an oligonucleotide, a linker and a polymer, or an oligonucleotide and a protein and/or a peptide and a polymer, or an oligonucleotide, a linker, and a protein and/or a peptide and a polymer, or an oligonucleotide, a linker, a spacer, a protein and/or a peptide and a polymer, a protein and/or peptide and a polymer, a protein and/or a peptide, a linker and a polymer, a protein and/or a peptide, a linker, a spacer and a polymer. Such conjugates preferably comprise or consist of one or more oligonucleotides, and/or one or more proteins and/or peptides, and/or one or more linkers, and/or one or more spacer, and one or more polymers, wherein the polymer is preferably a polyalkylen oxide, more preferably PEG. Examples of conjugates are illustrated in the following, which does not represent a limitation of the invention to these examples:

a) polymer-(oligonucleotide, protein or peptide)ₙ
b) (oligonucleotide, protein or peptide)ₙ-polymer
c) polymer-(oligonucleotide, protein or peptide)ₙ-polymer
d) polymer-(polymer, linker and/or spacer-(oligonucleotide, protein or peptide)ₙ)ₓ
e) (linker and/or spacer-(oligonucleotide, protein or peptide)ₙ)ₓ-polymer
f) polymer-(polymer, linker and/or spacer-(oligonucleotide, protein or peptide)ₙ)ₓ-polymer
g) polymer-(polymer, linker and/or spacer-(oligonucleotide, protein or peptide)ₙ)ₓ-linker and/or spacer-polymer
h) polymer-(oligonucleotide)ₙ-(protein and/or peptide)ₘ
i) (oligonucleotide)ₙ-(protein and/or peptide)ₘ-polymer
j) polymer-(oligonucleotide)ₙ-(protein and/or peptide)ₘ-polymer
k) (linker and/or spacer-(oligonucleotide)ₙ-(protein and/or peptide)ₘ)ₓ-polymer
l) (linker and/or spacer-(oligonucleotide)ₙ-(protein and/or peptide)ₘ)ₓ-linker and/or spacer-polymer
m) polymer-(polymer, linker and/or spacer-(oligonucleotide)ₙ-(protein and/or peptide)ₘ)ₓ-linker and/or spacer-polymer
n) polymer-((oligonucleotide)ₙ-linker, spacer and/or polymer-(protein and/or peptide)ₘ)ₓ
o) ((oligonucleotide)ₙ-linker, spacer and/or polymer-(protein and/or peptide)ₘ)ₓ-polymer
p) polymer-((oligonucleotide)ₙ-linker, spacer and/or polymer-(protein and/or peptide)ₘ)ₓ-polymer
q) polymer-(protein and/or peptide)ₘ-(oligonucleotide)ₙ
r) (protein and/or peptide)ₘ-(oligonucleotide)ₙ-polymer
s) polymer-(protein and/or peptide)ₘ-(oligonucleotide)ₙ-polymer
t) polymer-(polymer, linker and/or spacer-(protein and/or peptide)ₘ-(oligonucleotide)ₙ)ₓ
u) (linker and/or spacer-(protein and/or peptide)ₘ-(oligonucleotide)ₙ)ₓ-polymer
v) polymer-(polymer, linker and/or spacer-(protein and/or peptide)ₘ-(oligonucleotide)ₙ)ₓ-polymer
w) polymer-((protein and/or peptide)ₘ-polymer, linker and/or spacer-(oligonucleotide)ₙ)ₓ
x) ((protein and/or peptide)ₘ-polymer, linker and/or spacer-(oligonucleotide)ₙ)ₓ-polymer
y) polymer-((protein and/or peptide)ₘ-polymer, linker and/or spacer-(oligonucleotide)ₙ)ₓ-polymer
z) polymer-linker and/or spacer-((protein and/or peptide)ₘ-polymer, linker and/or spacer-(oligonucleotide)ₙ)ₓ-linker and/or spacer-polymer,
wherein m, n, and x are independent of each other 1 to 20, preferably, 1 to 15, more preferred 1 to 10, even more preferred 1 to 5, and mostly preferred 1 to 3. The term “polymer” in these examples means one or more polymer, which is linked to an end or to any other part of the oligonucleotide, protein and/or peptide.

[0136] In yet other embodiments the conjugate or compound is complexed to biological or chemical carriers or is coupled to tissue-type or cell-type directed ligands or antibodies.

[0137] In some embodiments of the invention the active modifications of the conjugate or compound comprises oligonucleotides as mentioned herein that have additional nucleotide building blocks. These nucleotide building blocks are chosen in the way, that they support the hybridization with the target region or at least do not influence the hybridization negatively. Those conjugates or compounds with the respective antisense structure of the mRNA of said targets are still within the scope of this invention. The additionally nucleotides in one embodiment are according to the coding region of the mRNA, in yet another embodiment the additional nucleotides are also from the non coding part of the mRNA, including introns and exons. The additionally nucleotide comprises at least one nucleotide, preferably from about 1 to about 10,000 nucleotides, from about 1 to about 5,000 nucleotides, from about 1 to about 3000 nucleotides, from about 1 to about 1,000 nucleotides, from about 1 to about 500 nucleotides, from about 1 to about 100 nucleotides, from about 1 to about 50 nucleotides, from about 1 to about 25 nucleotides, from about 1 to about 10 nucleotides, from about 1 to about 5 nucleotides or from about 1 to about 2 nucleotides bound to at least one of the 3′ and/or 5′ end, in another embodiment on at least one of the 2′ or 5′ end. In yet another embodiment some nucleotide building blocks of those oligonucleotides respectively polynucleotides may be modified or substituted by spacers as described herein.

[0138] For more details for derivatisation see for example Gualtieri (2000), R. Schlingensiepen (1997) or Hecht (1997) herein incorporated by reference.

[0139] Polymers in the context of this application comprise biocompatible materials, such as polyalkylen oxides, more preferred polyethyleneglycol, for example alpha-, omega-dihydroxylpolyethyleneglycol, biodegradable lactone-based polymers, e.g. polyacrylic acid, polylactide acid (PLA), poly(glycolic acid) (PGA), polypropylene, polystyrene, polyolefin, polyamide, polycyanoacrylate, polyimide, polyethylenterephthalate (PET, PETG), polyethylene terephthalate (PETE), polytetramethylene glycol (PTG), or polyurethane as well as mixtures thereof. Mixture refers to the use of different polymers within the same compound as well as it refers to block copolymers. Block copolymers are polymers wherein at least one section of a polymer is build up from monomers of another polymer.

[0140] Selection of such materials depends on a number of factors including the stability and toxicity of the polymer.

[0141] In one embodiment an oligonucleotide, a protein and/or a peptide such as an immunostimulator is linked with at least one polymer, more preferred polyalkylen oxide, even more preferred polyethyleneglycol has an average weight of from about 0.05 kg/mol to about 50 kg/mol, in a more preferred embodiment from about 0.05 kg/mol to about 5 kg/mol, or from about 5 kg/mol to about 20 kg/mol or from about 20 kg/mol to about 50 kg/mol. In other embodiments the polymer has a weight of about 0.05 kg/mol to about 1 kg/mol, from about 1 kg/mol to about 10 kg/mol, from about 10 kg/mol to about 25 kg/mol, from about 25 kg/mol to about 50 kg/mol. In yet other embodiments the polymer has a weight of from about 0.05 kg/mol to about 0.15 kg/mol, about 0.15 kg/mol to about 0.25 kg/mol, about 0.25 kg/mol to about 0.35 kg/mol, about 0.35 kg/mol to about 0.45 kg/mol, about 0.45 kg/mol to about 0.55 kg/mol, about 0.55 kg/mol to about 0.65 kg/mol, about 0.65 kg/mol to about 0.75 kg/mol, about 0/5 kg/mol to about 0.85 kg/mol, about 0.85 kg/mol to about 0.95 kg/mol, about 0.95 kg/mol to about 1.05 kg/mol, about 1.05 kg/mol to about 1150 kg/mol, about 1.15 kg/mol to about 1.25 kg/mol, about 1.25 kg/mol to about 1.55 kg/mol, about 1.55 kg/mol to about 1.85 kg/mol, about 1.85 kg/mol to about 2.15 kg/mol, about 2.15 kg/mol to about 2.45 kg/mol, about 2.45 kg/mol to about 2.75 kg/mol, about 2.75 kg/mol to about 3.05 kg/mol, about 3.05 kg/mol to about 3.35 kg/mol, about 3.35 kg/mol to about 3.65 kg/mol, about 3.65 kg/mol to about 4.3 kg/mol, about 4.3 kg/mol to about 4.6 kg/mol, about 4.6 kg/mol to about 5.5 kg/mol, 5.5 kg/mol to about 6.5 kg/mol, 6.5 kg/mol to about 7.5 kg/mol, 7.5 kg/mol to about 8.5 kg/mol, 8.5 kg/mol to about 9.5 kg/mol, 9.5 kg/mol to about 10.5 kg/mol, 10.5 kg/mol to about 11.5 kg/mol, 11.5 kg/mol to about 12.5 kg/mol, 12.5 kg/mol to about 13.5 kg/mol, 13.5 kg/mol to about 14.5 kg/mol, 14.5 kg/mol to about 15.5 kg/mol, 15.5 kg/mol to about 16.5 kg/mol, 16.5 kg/mol to about 17.5 kg/mol, 17.5 kg/mol to about 18.5 kg/mol, 18.5 kg/mol to about 19.5 kg/mol, 19.5 kg/mol to about 20.5 kg/mol, 20.5 kg/mol to about 21.5 kg/mol, 21.5 kg/mol to about 22.5 kg/mol, 22.5 kg/mol to about 23.5 kg/mol, 23.5 kg/mol to about 24.5 kg/mol, 24.5 kg/mol to about 25.5 kg/mol, 25.5 kg/mol to about 26.5 kg/mol, 26.5 kg/mol to about 27.5 kg/mol, 27.5 kg/mol to about 28.5 kg/mol, 28.5 kg/mol to about 29.5 kg/mol, 29.5 kg/mol to about 30.5 kg/mol, 30.5 kg/mol to about 31.5 kg/mol, 30.5 kg/mol to about 31.5 kg/mol, 30.5 kg/mol to about 31.5 kg/mol, 31.5 kg/mol to about 32.5 kg/mol, 32.5 kg/mol to about 33.5 kg/mol, 33.5 kg/mol to about 34.5 kg/mol, 34.5 kg/mol to about 35.5 kg/mol, 35.5 kg/mol to about 36.5 kg/mol, 36.5 kg/mol to about 36.5 kg/mol, 36.5 kg/mol to about 37.5 kg/mol, 37.5 kg/mol to about 38.5 kg/mol, 38.5 kg/mol to about 39.5 kg/mol, 39.5 kg/mol to about 40.5 kg/mol, 40.5 kg/mol to about 41.5 kg/mol, 41.5 kg/mol to about 42.5 kg/mol, 42.5 kg/mol to about 43.5 kg/mol, 43.5 kg/mol to about 44.5 kg/mol, 44.5 kg/mol to about 45.5 kg/mol, 45.5 kg/mol to about 46.5 kg/mol, 46.5 kg/mol to about 46.5 kg/mol, 46.5 kg/mol to about 47.5 kg/mol, 47.5 kg/mol to about 48.5 kg/mol, 48.5 kg/mol to about 49.5 kg/mol, 49.5 kg/mol to about 50.5 kg/mol.

[0142] In further preferred embodiments the average molecular weight of the polymer is about 0.1 kg/mol, about 0.2 kg/mol, about 0.3 kg/mol, about 0.4 kg/mol, about 0.5 kg/mol, about 0.6 kg/mol, about 0.7 kg/mol, about 0.8 kg/mol, about 0.9 kg/mol, about 1 kg/mol, about 1.1 kg/mol, about 1.2 kg/mol, about 1.3 kg/mol, about 1.4 kg/mol, about 1.5 kg/mol, about 1.5 kg/mol, about 1.6 kg/mol, about 1.7 kg/mol, about 1.8 kg/mol, about 1.9 kg/mol, about 2 kg/mol, about 2.2 kg/mol, about 2.4 kg/mol, about 2.6 kg/mol, about 2.8 kg/mol, about 3 kg/mol about 3.1 kg/mol, about 3.2 kg/mol, about 3.3 kg/mol, about 3.4 kg/mol, about 3.5 kg/mol, about 3.6 kg/mol, about 3.7 kg/mol, about 3.8 kg/mol, about 3.9 kg/mol, about 4 kg/mol, about 4.1 kg/mol, about 4.2 kg/mol, about 4.3 kg/mol, about 4.4 kg/mol, about 4.5 kg/mol, about 4.6 kg/mol, about 4.7 kg/mol, about 4.8 kg/mol, about 4.9 kg/mol, about 5 kg/mol about 5.5 kg/mol, about 6 kg/mol, about 6.5 kg/mol, about 7 kg/mol, about 7.5 kg/mol, about 8 kg/mol, about 8.5 kg/mol, about 9 kg/mol, about 9.5 kg/mol, about 10 kg/mol, about 11 kg/mol, about 12 kg/mol, about 13 kg/mol, about 14 kg/mol, about 15 kg/mol, about 16 kg/mol, about 17 kg/mol, about 18 kg/mol, about 19 kg/mol, about 20 kg/mol, about 21 kg/mol, about 22 kg/mol, about 23 kg/mol, about 24 kg/mol, about 25 kg/mol, about 26 kg/mol, about 27 kg/mol, about 28 kg/mol, about 29 kg/mol, about 30 kg/mol, about 31 kg/mol, about 32 kg/mol, about 33 kg/mol, about 34 kg/mol, about 35 kg/mol, about 36 kg/mol, about 37 kg/mol, about 38 kg/mol, about 39 kg/mol, about 40 kg/mol, about 41 kg/mol, about 42 kg/mol, about 43 kg/mol, about 44 kg/mol, about 45 kg/mol, about 46 kg/mol, about 47 kg/mol, about 48 kg/mol, about 49 kg/mol, about 50 kg/mol.

[0143] The term about refers to the fact, that commercially available polymers are not completely homogenous in weight, but are fractions of polymers with about a certain weight not defined accurately by the mass, but differs around this mentioned average mass/weight dependent of the absolute mass and according to the way of synthesis and/or purification. The average molecular weight refers to the weight-average molecular weight. In one embodiment one of two polymers is linked to the 3′-end and the second polymer is linked to the 5′-end or the respective portion of the nucleotide building block of the oligonucleotide.

[0144] In a further preferred embodiment the polymer linked to the 3′-end has a higher weight compared with the polymer linked to the 5′-end. In a further preferred embodiment the 3′-polymer has the 1.5 to 100-fold molecular weight of the polymer linked to the 5′-end.

[0145] In another preferred embodiment the polymer linked to the 5′-end has a higher molecular weight compared with the polymer linked to the 3′-end. In a further preferred embodiment the 3′-polymer has the 1.5- to 100-fold weight of the polymer linked to the 5′-end.

[0146] In further preferred embodiments the weight ratio of the polymers is 1:1.5, 1:2, 1:2.5, 1:3, 1:3.5, 1:4, 1:4.5, 1:5, 1:5.5, 1:6, 1:7, 1:7.5, 1:8, 1:8.5, 1:9, 1:9.5, 1:10, 1:11, 1:12, 1:13, 1:14, 1:15, 1:16, 1:17, 1:18, 1:19, 1:20, 1:22, 1:24, 1:26, 1:28, 1:30, 1:32, 1:34, 1:36, 1:38, 1:40, 1:42, 1:44, 1:46, 1:48, 1:50, 1:55, 1:60, 1:65, 1:70, 1:75, 1:80, 1:85, 1:90, 1:95, 1:100.

[0147] In further preferred embodiments the smaller polymer has an average molecular weight of 0.4 kg/mol, 0.6 kg/mol, or 0.8 kg/mol and the other polymer has an average weight of 0.8 kg/mol, 1 kg/mol, 1.2 kg/mol, 1.4 kg/mol, 1.6 kg/mol, 1.8 kg/mol, 2 kg/mol, 3 kg/mol, 4 kg/mol or 5 kg/mol.

[0148] In even more preferred embodiments the molecular weight of the polymer is between 200 Da to 50 000 Da, preferably 400 Da to 40 000 Da, more preferred 400 Da to 20 000 Da, and even more preferred 400 Da to 10 000 Da. In particular, the molecular weight of the polymer is 200, 300, 400, 500, 600, 700, 800, 900, 1000, 1250, 1500, 1750, 2000, 2250, 2500, 2750, 3000, 3250, 3500, 3750, 4000, 4250, 4500, 4750, 5000, 5500, 6000, 6500, 7000, 7500, 8000, 8500, 9000, 9500, 10000, 11000, 12000, 13000, 14000, 15000, 16000, 17000, 18000, 19000, 20000, 21000, 22000, 23000, 24000, 25000, 26000, 27000, 28000, 29000, 30000, 31000, 32000, 33000, 34000, 35000, 36000, 37000, 38000, 39000, 40000, 41000, 42000, 43000, 44000, 45000, 460000, 47000, 48000, 49000, 50000, 75000, or 1000000 Da.

[0149] Preferably, the oligonucleotide, the protein and/or the peptide is linked with at least two polymers, which are identical or different in the molecular weight of the polymers. Even more preferably, a conjugate or compound of the invention comprises a polymer for example polyalkylen oxide such as PEG, and an oligonucleotide, wherein at least one PEG is linked to the 5′-end of the oligonucleotide and at least one PEG is linked to the 3′-end of the oligonucleotide, wherein the molecular weight of the PEG linked to the 5′- and 3′-end of the oligonucleotide is identical and is <5000 Da, or wherein the molecular weight of the PEG linked to the 5′- and 3′-end of the oligonucleotide is different. When the molecular weight of the PEG linked to the 5′- and 3′-end of the oligonucleotide is identical, the molecular weight of the PEG is preferably 200, 300, 400, 500, 600, 700, 800, 900, 1000, 1250, 1500, 1750, 2000, 2250, 2500, 2750, 3000, 3250, 3500, 3750, 4000, 4250, 4500 or 4750 Da. When the molecular weight of the PEG linked to the 5′- and 3′-end of the oligonucleotide is different, the molecular weight of the polyethylene glycol linked to the 5′-end is preferably 200, 300, 400, 500, 600, 700, 800, 900, 1000, 1250, 1500, 1750, 2000, 2250, 2500, 2750, 3000, 3250, 3500, 3750, 4000, 4250, 4500 or 4750, 5000, 10000, 20000, 50000 or 1000000 Da and the molecular weight of the polyethylene glycol linked to the 3′-end of the oligonucleotide is preferably 200, 300, 400, 500, 600, 700, 800, 900, 1000, 1250, 1500, 1750, 2000, 2250, 2500, 2750, 3000, 3250, 3500, 3750, 4000, 4250, 4500 or 4750, 5000, 10000, 20000, 50000 or 1000000 Da.

[0150] In case of double stranded RNA or DNA, one end of one strand is linked to a polymer, both ends of one strand or both ends of both strands are linked to a polymer, or both ends of one strand are linked to a polymer and one end of the other strand is linked to a polymer.

[0151] Moreover, one or more polymers are linked to the 5′- and 3′-end of an oligonucleotide or to the N- and the C-terminus of a protein or peptide. Alternatively, one or more polymers are linked to one end of the oligonucleotide, the protein and/or the peptide, and any other possible linking point in the oligonucleotide, protein and/or peptide. In a further alternative, one or more polymers are linked to both ends of the oligonucleotide, protein and/or peptide, and any other linking point in the oligonucleotide, protein and/or peptide. Preferably, the oligonucleotide, the protein and/or the peptide is specifically linked with one or more polymers at selected positions of the oligonucleotide, the protein, and/or the peptide.

[0152] In preferred embodiments, a polymer is linked to each end of the oligonucleotide, protein and/or peptide, wherein the polymers are identical in size having for example a molecular weight of 200, 300, 400, 500, 600, 700, 800, 900, 1000, 1250, 1500, 1750, 2000, 2250, 2500, 2750, 3000, 3250, 3500, 3750, 4000, 4250, 4500, 4750, 5000, 5500, 6000, 6500, 7000, 7500, 8000, 8500, 9000, 9500, 10000, 11000, 12000, 13000, 14000, 15000, 16000, 17000, 18000, 19000, 20000, 21000, 22000, 23000, 24000, 25000, 26000, 27000, 28000, 29000, 30000, 31000, 32000, 33000, 34000, 35000, 36000, 37000, 38000, 39000, 40000, 41000, 42000, 43000, 44000, 45000, 460000, 47000, 48000, 49000, 50000, 75000 or 100000 Da. As a specific type of polymers might slightly differ in size depending on the isolating, synthetization, degradation over the time, the molecular weights indicated represent an average molecular weight. Moreover, the term “identical” comprises differences in the molecular weight of the polymer of 1 to 50%, preferably 1 to 30%, more preferred 1 to 20%, and even more preferred 1 to 10%

[0153] Polymers of identical molecular weight linked with the 5′-end and the 3′-end of an oligonucleotide, and/or the N-terminus and the C-terminus of a protein and/or a peptide have preferably a molecular weight of 200, 300, 400, 500, 600, 700, 800, 900, 1000, 1250, 1500, 1750, 2000, 2250, 2500, 2750, 3000, 3250, 3500, 3750, 4000, 4250, 4500 or 4750 Da.

[0154] In even more preferred embodiments, a polymer is linked to each end of the oligonucleotide, protein and/or peptide, wherein the polymers differ in size. Preferred combinations of molecular weight of polymers linked with an oligonucleotide, protein and/or peptide are for example polymers of 200 or 300, 400 or 500, 600 or 700, 800 or 900, 1000 or 1250, 1500 or 1750, 2000 or 2250, 2500 or 2750, 3000 or 3250, 3500 or 3750, 4000 or 4250, 4500 or 4750 or 5000 and 1000 or 1250 or 1500 or 1750 or 2000 or 2250 or 2500 or 2750 or 3000 or 3250, 3500 or 3750 or 4000 or 4250 or 4500 or 4750 or 5000 or 5500 or 6000 or 6500 or 7000 or 7500 or 8000 or 8500 or 9000 or 9500 or 10000 or 11000 or 12000 or 13000 or 14000 or 15000 or 16000 or 17000 or 18000 or 19000 or 20000 or 21000 or 22000 or 23000 or 24000 or 25000 or 26000 or 27000 or 28000 or 29000 or 30000 or 31000 or 32000 or 33000 or 34000 or 35000 or 36000 or 37000 or 38000 or 39000 or 40000 or 41000 or 42000 or 43000 or 44000 or 45000 or 460000 or 47000 or 48000 or 49000 or 50000 or 75000 or 100000 Da. Preferably, molecular weight combinations of polymers linked with an oligonucleotide, protein and/or peptide are polymers of 400 Da and 800 Da, 400 Da and 2000 Da, 400 Da and 5000 Da, or 400 Da and 20000 Da.

[0155] In one embodiment the at least one polymer of the conjugate or compound is linear (single stranded). In yet another embodiment the polymer is branched. There can be one branch or several branches in the polymer, the polymer in one embodiment is polyoxyalkylene, more preferred polyethyleneglycol. Preferably, at least two, for example 2, 3, 4, 5, 6, 7, 8, 9, or 10 polymers are connected with each other via a linker, e.g., a Lys core leading to a branched polymer.

[0156] The linkage between the oligonucleotide, the protein and/or the peptide and the at least one polymer is optionally by at least one linker. In some embodiments linkers are sensitive to enzymes, pH value and/or other parameters, which allow the oligonucleotide to be split of the polymer under specific conditions. Linkers are known in the art. For more details see also Hermanson (1996). Examples for homobifunctional linkers are Lomant's reagent dithiobis (succinimidylpropionate) DSP, 3′3′-dithiobis(sulfosuccinimidyl proprionate (DTSSP), disuccinimidyl suberate (DSS), bis(sulfosuccinimidyl)suberate (BS), disuccinimidyl tartrate (DST), disulfosuccinimidyl tartrate (sulfo DST), ethylene glycobis(succinimidylsuccinate) (EGS), disuccinimidyl glutarate (DSG), N,N′-disuccinimidyl carbonate (DSC), dimethyl adipimidate (DMA), dimethyl pimelimidate (DMP), dimethyl suberimidate (DMS), dimethyl-3,3′-dithiobispropionimidate (DTBP), 1,4-di-3′-(2′-pyridyldithio)propionamido)butane (DPDPB), bismaleimidohexane (BMH), aryl halide-containing compound (DFDNB, such as e.g. 1,5-difluoro-2,4-dinitrobenzene or 1,3-difluoro-4,6-dinitrobenzene, 4,4′-difluoro-3,3′-dinitrophenylsulfone (DFDNPS), bis-[β-(4-azidosalicylamido)ethyl]disulfide (BASED), formaldehyde, glutaraldehyde, 1,4-butanediol diglycidyl ether, adipic acid dihydrazide, carbohydrazide, o-toluidine, 3,3′-dimethylbenzidine, benzidine, α,α′-p-diaminodiphenyl, diiodo-p-xylene sulfonic acid, N,N′-ethylene-bis(iodoacetamide), N,N′-hexamethylene-bis(iodoacetamide).

[0157] The linkage with heterobifunctional linkers is preferred since the linkage can be better controlled. Examples for heterobifunctional linkers are amine-reactive and sulfhydryl cross-linkers such as N-succinimidyl 3-(2-pyridyldithio)propionate (sPDP), long-chain N-succinimidyl 3-(2-pyridyldithio)propionate (LC-sPDP), water-soluble-long-chain N-succinimidyl 3-(2-pyridyldithio) propionate (sulfo-LC-sPDP), succinimidyloxycarbonyl-α-methyl-α-(2-pyridyldithio)toluene (sMPT), sulfosuccinimidyl-6-[α-methyl-α-(2-pyridyldithio)toluamido]hexanoate (sulfo-LC-sMPT), succinimidyl-4-(N-maleimidomethyl)cyclohexane-1-carboxylate (sMCC), sulfosuccinimidyl-4-(N-maleimidomethyl)cyclohexane-1-carboxylate (sulfo-sMCC), m-maleimidobenzoyl-N-hydroxysuccinimide ester (MBs), m-maleimidobenzoyl-N-hydroxysulfosuccinimide ester (sulfo-MBs), N-succinimidyl(4-iodoacteypaminobenzoate (sIAB), sulfosuccinimidyl(4-iodoacetyl)aminobenzoate (sulfo-sIAB), succinimidyl-4-(p-maleimidophenyl)butyrate (sMPB), sulfosuccinimidyl-4-(p-maleimidophenyl)butyrate (sulfo-sMPB). N-(γ-maleimidobutyryloxy)succinimide ester (GMBs). N-(γ-maleimidobutyryloxy)sulfosuccinimide ester (sulfo-GMBs), succinimidyl 6-((iodoacetyl)amino)hexanoate (sIAX), succinimidyl 6-[6-(((iodoacetyl)amino)hexanoyl)amino]hexanoate (sIAXX), succinimidyl 4-(((iodoacetyl)amino)methyl)cyclohexane-1-carboxylate (sIAC), succinimidyl 6-((((4-iodoacetyl)amino)methyl)cyclohexane-1-carbonyl)amino)hexanoate (sIACX), p-nitrophenyl iodoacetate (NPIA), carbonyl-reactive and sulfhydryl-reactive cross-linkers such as 4-(4-N-maleimidophenyl)butyric acid hydrazide (MPBH), 4-(N-maleimidomethyl)cyclohexane-1-carboxyl-hydrazide-8 (M₂C₂H), 3-(2-pyridyldithio)propionyl hydrazide (PDPH), amine-reactive and photoreactive cross-linkers such as N-hydroxysuccinimidyl-4-azidosalicylic acid (NHs-AsA). N-hydroxysulfosuccinimidyl-4-azidosalicylic acid (sulfo-NHs-AsA), sulfosuccinimidyl-(4-azidosalicylamido)hexanoate (sulfo-NHs-LC-AsA), sulfosuccinimidyl-2-(ρ-azidosalicylamido)ethyl-1,3′-dithiopropionate (sAsD), N-hydroxysuccinimidyl-4-azidobenzoate (HsAB), N-hydroxysulfosuccinimidyl-4-azidobenzoate (sulfo-HsAB), N-succinimidyl-6-(4′-azido-2′-nitrophenylamino)hexanoate (sANPAH), sulfosuccinimidyl-6-(4′-azido-2′-nitrophenylamino)hexanoate (sulfo-sANPAH). N-5-azido-2-nitrobenzoyloxysuccinimide (ANB-NOs), sulfosuccinimidyl-2-(m-azido-o-nitrobenzamido)-ethyl-1,3′-dithiopropionate (sAND), N-succinimidyl-4(4-azidophenyl)1,3′-dithiopropionate (sADP), N-sulfosuccinimidyl(4-azidophenyl)-1,3′-dithiopropionate (sulfo-sADP), sulfosuccinimidyl 4-(ρ-azidophenyl)butyrate (sulfo-sAPB), sulfosuccinimidyl 2-(7-azido-4-methylcoumarin-3-acetamide)ethyl-1,3′-dithiopropionate (sAED), sulfosuccinimidyl 7-azido-4-methylcoumarin-3-acetate (sulfo-sAMCA), ρ-nitrophenyl diazopyruvate (ρNPDP), ρ-nitrophenyl-2-diazo-3,3,3-trifluoropropionate (PNP-DTP), sulfhydryl-reactive and photoreactive cross-linkers such as1-(ρ-Azidosalicylamido)-4-(iodoacetamido)butane (AsIB), N-[4-(ρ-azidosalicylamido)butyl]-3′-(2′-pyridyldithio)propionamide (APDP), benzophenone-4-iodoacetamide, benzophenone-4-maleimide carbonyl-reactive and photoreactive cross-linkers such as ρ-azidobenzoyl hydrazide (ABH), carboxylate-reactive and photoreactive cross-linkers such as 4-(ρ-azidosalicylamido)butylamine (AsBA), and arginine-reactive and photoreactive cross-linkers such as ρ-azidophenyl glyoxal (APG).

[0158] In a preferred embodiment the polyethylene oxide is linked with the oligonucleotide using carbodiimide coupling. For more details see Hermanson (1996).

### Synthesis

[0159] The synthesis and purification, respectively, of an oligonucleotide, a protein and/or a peptide, e.g., an immunostimulator, are well known to those skilled in the art. For more details see for example Gualtieri (2000), R. Schlingensiepen (1997) or Hecht (1997) herein incorporated by reference.

[0160] For use in the instant invention, the nucleic acids or amino acids are for example synthesized de novo using any of a number of procedures well known in the art. Such compounds are referred to as synthetic nucleic acids, for example, the cyanoethyl phosphoramidite method (Beaucage, S. L., and Caruthers, M. H., Tet. Let. 22:1859, 1981); or nucleoside H-phosphonate method (Garegg et al., Tet. Let. 27:4051-4054, 1986; Froehler et al., Nucl. Acid. Res. 14: 5399-5407, 1986, Garegg et al, Tet. Let. 27:4055-4058, 1986, Gaffney et al., Tet. Let. 29: 2619-2622, 1988). These chemistries are for example performed by a variety of automated oligonucleotide synthesizers available on the market.

[0161] Alternatively, nucleic acids or amino acids, i.e., oligonucleotides or proteins or peptides are for example produced on a large scale in plasmids, (see, e.g., Sambrook, et al., Molecular Cloning: A Laboratory Manual, Cold Spring Harbor Laboratory Press, New York, 1989) and are for example separable into smaller pieces or administered in the whole. Nucleic acids are for example prepared from existing nucleic acid sequences (e.g. genomic or cDNA) and amino acids are for example prepared from existing amino acid sequences using known techniques, such as those employing restriction enzymes, exonucleases or endonucleases. Nucleic acids and amino acids prepared in this manner are referred to as isolated nucleic acids and isolated amino acids, respectively. The term oligonucleotide encompasses both synthetic and isolated nucleic acids. The term protein or peptide encompasses both synthetic and isolated amino acids.

[0162] One preferred embodiment for the synthesis of oligonucleotide-conjugates is solid phase synthesis using a first nucleotide coupled to a solid support, e.g. controlled pore glass (CPG) and nucleotide phosphoroamidites. The 5′-hydroxy group of the nucleotide phosphoroamidites is protected by dimethoxytrityl (DMT) and the exocyclic nitrogen atoms of the base are protected e.g. with benzoyl preferable for adenosine and cytidine, and isobutyryl preferable for guanosine. A synthesis cycle is done as follows:

[0163] The DMT protecting group of the terminal 5′-hydroxy group of the support-bound nucleotide chain is removed and the hydroxy function is reacted with the phosphoramidite group of the added nucleotide resulting in a phosphite triester linkage. This is stabilized by oxidation to a phosphate linkage. In a preferred embodiment this oxidation is done by a sulfurizing reagent, e.g., 3H-1,2-benzodithiol-3-one, 1,1-dioxide (Beaucage reagent) resulting in thiophosphate linkage. Non-reacted 5-hydroxy groups are capped to prevent synthesis of failure sequences. This procedure is repeated until the desired number of nucleotides is added.

[0164] In one embodiment the polymer is linked to the 5′-terminus of the oligonucleotide by using a DMT-protected phosphoramidite-derivative of the polymer as educt in the last synthesis cycle. Cleaving from the support results in deprotection of the bases and gives the 5′-DMT-protected oligonucleotide or conjugate respectively. This DMT-on product preferably is purified before detrylation.

[0165] Proteins are preferably synthesized by liquid-phase, in particular with regard to large-scale production, or more preferably by solid-phase synthesis. Solid-phase synthesis (SPPS), for example according to Merrifield, allows the synthesis of natural or even non-natural proteins or peptides, which are difficult or even non-expressable in bacteria, the incorporation of unnatural amino acids, peptide/protein backbone modification, and the synthesis of D-proteins consisting of D-amino acids. Small solid beads (e.g., polystyrene resin or polyamide resin), insoluble yet porous, are treated with functional units (“linker”) on which a protein or peptide chain is buildable. The protein or peptide remains covalently attached to the bead until cleaved from it by a reagent such as trifluoroacetic acid. The protein or peptide is “immobilized” on the solid-phase and is retained for example during a filtration process. The general principle of SPPS is one of repeated cycles of coupling and deprotection. The free N-terminal amine of a solid-phase attached protein or peptide is coupled to a single N-protected amino acid unit. This is then deprotected, revealing a new N-terminal amine to which a further amino acid is attachable. The important consideration in each step is to generate high yield in each step, whereby each amino acid is added in each step in major excess (e.g., 2 to 10×). Solid-phase protein/peptide synthesis proceeds in a C-terminal to N-terminal fashion. For coupling the amino acids, the carboxyl group is preferably activated for example by carbodiimides such as dicyclohexylcarbodiimide (DCC) or diisopropylcarbodiimide (DIC), or by aromatic oximes such as 1-hydroxy-benzotriazole (HOBt), 1-hydroxy-7-aza-benzotriazole (HOAt), HBTU, HATU, or PyBOP. The N-termini of amino acid monomers is protected for example by Fmoc (9-fluorenylmethyl carbamate) or t-Boc (tert-butyl oxy carbonyl), and added onto a deprotected amino acid chain. To remove t-Boc from a growing protein or peptide chain, acidic conditions are used (for example neat trifluoroacetic acid (TFA)). Removal of side-chain protecting groups and cleavage of the protein or peptide from the resin at the end of the synthesis is achieved for example by incubating in hydrofluoric acid. To remove Fmoc from a growing peptide chain, basic conditions (for example piperidine in DMF) are used. Removal of side-chain protecting groups and cleavage of the protein or peptide from the resin is achieved for example by incubating with TFA, deionized water, and triisopropylsilane. A further protective group is for example a benzyloxy-carbonyl (Z) group, which is preferably used for side chain protection, and which is for example removed by HBr/acetic acid or hydrogenation. Another protective group is an alloc protecting group, which is preferably used to protect a carboxylic acid, a hydroxyl or an amino group when an orthogonal deprotection scheme is required. The alloc protecting group is preferably removed using for example tetrakis(triphenylphosphine)-palladium along with a mixture of chloroform, acetic acid, and N-methylmorpholine (e.g., 37:2:1). Also cyclic proteins or peptides are synthesizable via a solid phase synthesis. Preferably, side chains are protected by different protecting groups, which allow specific deprotection of certain side chains depending on the reaction conditions such as pH. The following amino acids are preferably targeted for modification: Glu, Asp, Cys, Lys, Arg, Ser, Tyr, and His, i.e., for example the alcohol functions of Ser and Thr, the phenol of Tyr, the guanidine of arginine, or the thiol of Cys.

[0166] Preferably, the NH₂ groups of the protein or peptide are selectively protected for a specific coupling of a polymer for example PEG. For example a protecting group A is protecting the N-terminus of the protein or peptide, a protecting group B is protecting assigned Lys-side chain NH groups, and the protecting group C is connected to all NH₂ groups of side chains, which shall not be linked to the polymer. For example the protective groups A, B, and C are used for the synthesis of the protein or peptide and the linkage of a polymer, group A is selectively deprotected in a first step and the protein or peptide is selectively linked to a polymer at site X. In a second step protective group B is selectively removed and the protein or peptide is selectively linked to further PEG at the site Y. In a last step the protein or peptide is cleaved from the support and the remaining protecting groups C, which are not intended to be linked to a polymer, are removed.

[0167] Furthermore, the protein or peptide synthesis is based on microwave technique, wherein each single step is done in a monomode microwave apparatus for example within 30 sec.

[0168] Alternatively, larger proteins or peptide are constructed via native chemical ligation of two or more smaller peptides or proteins. In native chemical ligation a peptide or protein containing a C-terminal thioester reacts with another protein or peptide containing an N-terminal cysteine for example in the presence of an exogenous thiol catalyst. In a first step a transthioesterfication occurs. In a second step the product preferably rearranges irreversibly under the usual reaction conditions to form an amide bond. Protein- or peptide-thioesters usable in native chemical ligation are for example prepared by BOC chemistry SPPS. Moreover, protein or polypeptide C-terminal thioesters produced by recombinant DNA techniques react with a N-terminal Cys containing protein or polypeptide by native ligation chemistry to provide large semisynthesized proteins or polypeptides.

[0169] In yet another embodiment at least one polymer is linked to the oligonucleotide, protein and/or peptide in solution. The linkage of at least one polymer with the oligonucleotide, protein and/or peptide is done by activating certain groups of the oligonucleotide, protein and/or peptide and/or the polymer and then linking those molecules. Preferred for coupling of the polymer are the 3′ and/or the 5′ end of the oligonucleotide or the N-terminus and/or the C-terminus of the protein and/or peptide. In an alternative embodiment, conjugates comprising or consisting of an oligonucleotide and a protein and/or peptide, one or more polymers are preferably linked to the 5′ end of the oligonucleotide and one or more polymers are linked to the C-terminus of the protein and/or peptide; or one or more polymers are preferably linked to the N-terminus of the protein and/or the peptide and one or more polymers are linked to the 3′ end of the oligonucleotide; or one or more polymers are preferably linked to the 5′ end of the oligonucleotide and one or more polymers are linked to the N-terminus of the protein and/or peptide; or one or more polymers are preferably linked to the 3′ end of the oligonucleotide and one or more polymers are linked to the C-terminus of the, wherein the polymer is in particular a polyalkylen oxide, more preferably PEG. Preferably the polymers are directly linked to the oligonucleotide and/or peptide or more preferably via one or more linkers and/or one or more spacers.

[0170] In yet other embodiments at least one polymer is coupled to another part of the oligonucleotide, protein and/or peptide. In some embodiments this part of the oligonucleotide is the phosphate-group, in other embodiments one or more polymers are coupled to the 2′-O of the sugar moiety of the nucleotide or the respective moiety of the nucleotide building block. In yet other embodiments the polymer is coupled to an activated group of the base of the nucleotide. In another embodiment instead of at least one nucleotide or one amino acid a spacer is used. Preferably, the spacer is used in combination with a linker, or substitutes the linker. The at least one polymer can be coupled to this spacer as well. Several polymers can be coupled to the oligonucleotide at different sites of the above described parts of the oligonucleotide.

[0171] In other embodiments one or more polymers are coupled to any aminoacid of the protein or peptide, in particular to SH-, OH-, or NH-groups of one or more amino acids. Proteins and peptides, respectively, couple preferably through their N-terminals (alpha-amine) and lysine side chain (epsilon-amine) functional groups. In addition, a free cysteine residue in a protein or peptide is PEGylated, or in the absence of free cysteine such cysteine residues are introducible into a protein or peptide by genetic engineering to create a specific site for PEGylation with site-directed mutagenesis or by modifications of amino groups with Iminothiolane. In preferred embodiments referring to conjugates comprising an oligonucleotide, a protein and/or a peptide, one or more polymers are preferably linked to one or both ends of the oligonucleotide, the protein and/or the peptide; or one or more polymers are linked to one or both ends of the oligonucleotide, the protein and/or the peptide, and/or to another part of the oligonucleotide such as the phosphate-group and/or the 2′-O of the sugar moiety of the oligonucleotide, and/or to another part of the protein and/or peptide such as SH— or NH-groups of one or more amino acids. The polymer is preferably linked to the oligonucleotide, protein and/or peptide via a linker and/or a spacer, wherein one or more polymers are linked to the end and/or another part of the linker and/or the spacer and/or the oligonucleotide, protein and/or peptide is linked to the end and/or another part of the linker and/or the spacer.

[0172] Optionally, a linker and/or a spacer is connected to the base, sugar, phosphate moiety, or any of its derivatives of an oligonucleotide, wherein the linker and/or spacer carries a functional group suitable for reaction with a polymer, e.g., a polyalkylen oxide such as PEG. Preferably, the functional group is protected by a protection group, which is removed before the reaction with the polymer. Same is applicable for a protein or peptide, wherein a linker and/or spacer is combinable with any amino acid or a sugar moiety of a glycoprotein.

[0173] Polymers are synthesized by polymerisation of the respective monomers, which are synthesized or isolated from natural sources. Most of them are commercially available or are achieved by standard synthesis, see for example Braun (2005).

[0174] Covalent attachment of a polymer, more preferred polyoxyalkylene, even more preferred polyethyleneglycol to an oligonucleotide, a protein and/or a peptide is accomplished by known chemical synthesis techniques. For more details see Hermanson (1996).

[0175] Linking the oligonucleotide, the protein and/or the peptide, e.g., an immunostimulator with at least one or at least two polymers is achieved by the reactivity of the active groups of those molecules such as COOH, CHO, OH, NH₂, SH etc. In general one functional group is activated and then linked with another active group of an oligonucleotide, a protein and/or a peptide.

[0176] In some preferred embodiments the selective derivatisation of preferred functional groups is achieved by protecting other functional groups that should not be linked with protecting groups. After linkage of the oligonucleotide, the protein and/or the peptide for example an immunostimulator with the at least one polymer those protection groups are removed.

[0177] In some embodiments the linkage of the oligonucleotide, the protein and/or the peptide such as an immunostimulator with the at least on polymer is on a solid phase, in yet other embodiments the linkage is done in solution.

[0178] A preferred method for the production of a conjugate or a compound of the present invention comprises the following steps: a) isolating or synthesizing the oligonucleotide, the protein or the peptide, including modified oligonucleotide, proteins, or peptides, b) protecting the 5′-end or the 3′-end of the oligonucleotide, and/or the N-terminus or C-terminus of the protein or peptide and/or other reactive groups of the amino acids forming the protein or peptide, and/or a phosphate group, a sugar moiety, and/or a base of the oligonucleotide, and/or an SH—, OH- and/or a NH-group or any other functional group of a protein or a peptide such as tyrosin-OH or a cycloprotein or -peptide and/or a sugar moiety of a glycoprotein, and c) linking at least one polymer for example polyalkylen oxide, e.g., PEG, with the unprotected 3′-end or 5′-end of the oligonucleotide and/or the unprotected C- or N-terminus of a protein or peptide. Optionally the method further comprises the steps: d) deprotecting the protected 5′-end or 3′-end of the oligonucleotide, and/or the N-terminus or C-terminus of the protein or peptide, and/or a phosphate group, a sugar moiety, and/or a base of the oligonucleotide, and/or an SH- and/or a NH-group of a protein or a peptide, and e) linking at least one polymer for example polyalkylen oxide such as PEG with the deprotected 5′-end or 3′-end of the oligonucleotide, and/or the deprotected phosphate group, sugar moiety, and/or base of the oligonucleotide and/or the deprotected N- or C-terminus of the protein or peptide and/or the deprotected SH- and/or a NH-group of the protein or peptide. Once at least one polymer for example polyalkylen oxide such as PEG is connected to the oligonucleotide, the protein and/or the peptide, the conjugate is optionally purified via one or more steps of purification, e.g., FPLC such as ion exchange FPLC, reverse phase HPLC, ultrafiltration, etc. In general, preferably the oligonucleotide, protein and/or peptide is conjugated with a polymer such as polyalkylen oxide, e.g., PEG, then the conjugate is purified for example via FPLC or HPLC, dried for example in a SpeedVac, desalted for example via ultrafiltration and dried again. In case of conjugation of a further polymer such as polyalkylen oxide, e.g., PEG, the sample is dissolved in water or buffer, incubated with a polymer, purified, dried, desalted, and dried again.

[0179] The conjugate is preferably stored in dried form or dissolved in water or buffer such as TEAA, or TEA.

### 5′-PEGylation of Oligonucleotides

[0180] In one preferred embodiment for 5′-polymer linkage, more preferred linking a polymer to an oligonucleotide (e.g. PEGylation), the polymer (e.g., PEG) is activated as phosphoramidite. In this embodiment DMT-protected-PEG is prepared by reacting an excess of the polymer with dimethoxytriphenylmethylchloride in the presence of for example triethanolamine (TEA) and 4-dimethylaminopyridine (DMAP). Reaction of DMT-PEG with 2-cyanoethyl-diisopropylchlorophosphoramidite in the presence of diisopropylethylamine gives access to DMT-polymer-phosphoramidites which than is preferably used as educt in the final cycle of standard oligonucleotide synthesis on CPG-solid-support.

[0181] In one embodiment intermediates are purified by column chromatography. The conjugate is preferably purified by for example RP-HPLC as DMT-on product. After detritylation with acetic acid, the final product is preferably desalted by ultrafiltration.

### 5′-Polymer Linkage of Oligonucleotides

[0182] In another preferred embodiment an oligonucleotide is linked with at least one polymer (e.g. polyoxyethylene, PEG) at the 5′-end. The oligonucleotide is prepared by conventional oligonucleotide synthesis, using for example a phosphoramidite in the final cycle, for example resulting in a 5′-amino group (5′-amino-modifier) or a 5′-thiol group (5′ thiol-modifier). A 5′-amino-modifier respectively a 5′-thiol-modifier is a linker covalently binding to the 5′-hydroxy-group of the sugar moiety of the nucleotide building block and adds a NH₂ respectively an SH group as active group for linking with the polymer. This group of the modifier is linked to a commercially available or custom synthesized functionalized PEG after deprotection according to standard procedures as described for example by Hermanson (1996).

[0183] In one preferred embodiment where the functional group of the oligonucleotide is NH₂ suitable functionalized polymers (e.g. PEG) are for example NHS-ester. NHS-carbamates or NHS-carbonates, 4-nitrophenylester or otherwise activated carboxylic acids.

[0184] In yet other embodiments, where the functional group of the oligonucleotide, e.g., an immunostimulator, is the SH-group, the functional groups of the polymer, more preferred the PEG, are for example maleimides or dithiodipyridyl-activated sulfhydryls.

### 3′-PEGylation of Oligonucleotides

[0185] In an alternative preferred embodiment for linking a polymer to the 3′-end of an oligonucleotide (e.g. 3′-PEGylation), the polymer is linked to a carboxy-functionalized CPG-support. This in one embodiment is prepared by succinylation of aminopropylated CPG-support using succinic anhydride in the presence of DMAP. The carboxyl groups of the succinylated CPG are activated by for example O-benzotriazole-N,N,N′,N′-tetramethyl-uronium-hexafluoro-phosphate (HBTU) in the presence of for example DMAP and diisopropylethylamine and subsequently reacted with the polymer (e.g., PEG). The resulting polymer-modified support is used as solid support in standard oligonucleotide synthesis, resulting in an oligonucleotide linked to the polymer via its 3′-terminus. Cleavage from the support using for example 32% NH₃ results in the deprotected, PEG-modified DMT-on product which then is detritylated, e.g., with acetic acid.

### 3′-PEGylation of Oligonucleotides

[0186] In yet another preferred embodiment a 3′-modified oligonucleotide is prepared by standard solid phase oligonucleotide chemistry using commercially available or custom synthesized supports, for example a 3′-amino-modifier or a 3′-thiol-modifier. A 3′-amino-modifier respectively a 3′-thiol-modifier in this context is a solid support, where the 3′ terminus of a nucleotide is linked to the solid support by a liner that results in a 3′ terminal NH₂ or SH function after cleavage of the oligonucleotide from the column. In one embodiment the resulting 3′-modified oligonucleotide is linked to a commercially available or custom synthesized functionalized PEG according to standard procedures as described for example by Hermanson (1996).

[0187] In further preferred embodiments the functional groups for linking a polymer (e.g. PEG) to aminomodified oligonucleotides are for example NHS-ester. NHS-carbamates or NHS-carbonates, 4-nitrophenylester or otherwise activated carboxylic acids. Functional groups suitable for polymer linkage (PEG conjugation) to sulfhydryls are maleimide or dithiodipyridyl-activated sulfhydryls.

3′,5′-di-polymer Linkage of Oligonucleotides

[0188] In yet an even more preferred embodiment the polymer (e.g., PEG) is linked to the 3′- and 5′-end of the oligonucleotide. In one embodiment these oligonucleotides linked with two polymers are prepared by combining above described embodiments using for example a DMT-polymer-phosphoramidite in the final cycle of the oligonucleotide synthesis on a polymer-modified CPG-support.

3′,5′-di-PEGylation of Oligonucleotides

[0189] In yet another more preferred embodiment compounds comprising at least one polymer (e.g., PEG) linked to both ends, the 3′- and the 5′-end, of the oligonucleotide are prepared by combining embodiments of solution phase chemistry as described above using a 3′-modifier and a 5′-modifier. In yet another embodiment the linkage of an oligonucleotide with at least two polymers is done by a combination of solid phase chemistry and solution phase chemistry.

[0190] In yet another embodiment the oligonucleotide, e.g., an immunostimulator, has two identical functional groups (e.g. SH, OH, NH₂). This oligonucleotide is suitable to conjugate identical polymers.

[0191] In yet another more preferred embodiment the oligonucleotide, for example an immunostimulator, has at least two different functional groups (e.g. SH, OH, NH₂). This oligonucleotide is suitable to conjugate different polymers. Preferred polymer combinations comprise for example PEG and polyacrylic acid, polylactic acid, poly(glycolic acid), polypropylene, polystyrene, polyolefin, polyamide, polycyanoacrylate, polyimide, polyethylenterephthalate (PET. PETG), polyethylene terephthalate (PETE), polytetramethylene glycol (PTG), or polyurethane as well as mixtures thereof.

### PEGylation of Proteins or Peptides

[0192] Preferably the protein or peptide is synthesized according to Merrifield, wherein side chains of the amino acids as well as the N-terminal end of the protein or peptide.

[0193] In a preferred embodiment of protein PEGylation, PEG is for example activated with trichloro-s-triazine (TsT; cyanuric acid). Reaction of TsT with PEG results for example in the formation of an activated derivative with an ether bond to the hydroxyl group of the polymer. TsT-activated PEG leads for example to linkage to sulfhydryl and amine groups of the protein or the peptide, or to the linkage to the phenolate and phenyl ring, respectively, of tyrosine.

[0194] In an alternative embodiment. PEG is activated in a first step preferably with an anhydride such as succinic anhydride or glutaric anhydride, resulting in PEG having carboxylates at one or both ends; alternatively, the terminal hydroxyl group of PEG is treated with phosgene or oxidized to carboxylate. Subsequently, the carboxylate groups are activated NHS esters for example reacting with sulfhydryl and/or hydroxyl groups as well as with primary and secondary amines. NHS ester groups react preferably with the alpha-amines at the N-terminus of the protein or peptide. In a preferred alternative. PEG is activated either with N-hydroxysuccinimidyl chloroformate or N,N′-disuccinimidyl carbonate. In case of a protein also further amine binding sites may be available.

[0195] In a further embodiment, acylation of PEG with succinic anhydride or glutaric anhydride gives bis-modified products having carboxylates at both ends. Modification of mPEG yields the monosubstituted derivative containing a single carboxylate. Once the carboxylate-PEG modification is formed, it is suitable to be coupled to amine-containing molecules using a carbodiimide activation for example.

[0196] In another embodiment, PEG is activated with N,N′-carbonyldiimidazole (CDI) and couples subsequently to a protein or peptide. Such CDI-activated PEG is stable for years in a dried state or in organic solvents devoid of water.

[0197] Additional alternatives for the activation and coupling of PEG to a protein or peptide are the reaction of PEG with epichlorhydrin under alkaline conditions leading to an epoxy derivative of PEG, or creating a sulfhydryl-reactive PEG via an active ester-maleimide heterobifunctional cross-linker, or a N-maleimido-6-aminocaproyl ester of 1-hydroxy-2-nitro-4-benzene sulfonic acid, or the Moffatt oxidation.

[0198] The newly synthesized protein or peptide comprises protecting groups, which are removeable under selective conditions for example acidic or basic conditions, or hydrogenation. After selective deprotection of assigned coupling sites the solid-support bound the protein or peptide is incubated with a polymer, an activated polymer for example an activated polyalkylen oxide such as PEG, which binds to the reactive groups of the protein or peptide. Afterwards the protein or peptide is cleaved from the support and the deprotected in particular selectively deprotected protein or peptide for example PEGylated at an amino acid side chain is optionally incubated another time with a polymer such as PEG, preferably an activated PEG. The second incubation results for example in a further PEGylation at another coupling site e.g. at the N-terminal end of the protein or peptide. Alternatively, the N-terminal protective group of a solid support bound, site chain protected protein or peptide is removed under specific conditions for example acidic or basic conditions, the protein or peptide is incubated with a polymer preferable an activated polymer leading to a protein or peptide linked to a polymer at the N-terminal end. The protein or peptide is cleaved from the support and optionally incubated a second time with a polymer to link the polymer to the C-terminal end, wherein the C-terminal is preferably activated. Afterwards the protective groups of the side chains are removed. Alternatively, the protective groups of the side chains are removed, after a polymer is linked to the N-terminal end, and in a final step the protein or peptide is cleaved from the support. In another alternative, the protein or peptide having a protected N-terminal end and side chains is cleaved from the support and incubated with a polymer preferably with an activated polymer. Once the polymer is linked to the C-terminal end, the protective groups of the side chains and the N-terminal end are optionally specifically removed for example under acidic and/or basic conditions and the protein is optionally incubated a further time with a polymer. In a further alternative, a polymer is linked to the sugar moiety of a glycoprotein and optionally to the N-terminal end, the C-terminal end and/or a side chain of the protein. Preferably, a sugar moiety of a glycoprotein is specifically modifiable by oxidation using sodium periodate to generate reactive aldehyde functions. These functional groups are suitable to be directly conjugated or used for coupling via heterobifunctional linkers for example PDPH or MPBH, both leading to SH-reactive functional groups. The sulfhydryl group finally reacts either directly with a polymer or via a linker and/or spacer with a polymer.

### Application

[0199] Besides being useful in human treatment, the present invention is also useful for other subjects including for example veterinary animals, reptiles, birds, exotic animals and farm animals, including for example mammals, rodents, and the like. Mammals include horses, dogs, pigs, cats, or primates (for example, a monkey, a chimpanzee, or a lemur). Rodents include rats, rabbits, mice, squirrels, or guinea pigs.

[0200] The oligonucleotide, protein and/or peptide linked with at least one polymer according to this invention is suitable to be administered by different routes. These routes of administration include, but are not limited to, electroporation, epidermal, impression into skin, intra-arterial, intra-articular, intra-cranial, intra-thecal, intra-cerebral, intra-dermal, intra-lesional, intra-muscular, intra-nasal, intra-ocular, intra-peritoneal, intra-prostatic, intra-pulmonary, intra-spinal, intra-tracheal, intra-tumoral, intra-venous, intra-vesicle placement within cavities of the body, nasal inhalation, oral, pulmonary inhalation (e.g., by inhalation or insufflation of powders or aerosols, including by nebulizer), subcutaneous, subdermal, transdermal, or topical (including ophthalmic and to mucous membranes including vaginal and rectal delivery). Topical administration further comprises administration of the skin, the eyes and the ears.

[0201] Dosing is dependent on severity and responsiveness of the disease state to be treated, with the course of treatment lasting from several days to several months, or until a cure is effected or a diminution of the disease state is achieved. Optimal dosing schedules are for example calculated from measurements of drug accumulation in the body of the patient. Persons of ordinary skill easily determine optimum dosages, dosing methodologies and repetition rates. Optimum dosages may vary depending on the relative potency of individual oligonucleotides with at least one polymer, and are generally be estimated based on EC₅₀ values found to be effective in in vitro and in vivo animal models. In general, dosage is for example from 0.01 μg to 100 g per kg of body weight, and may be given once or more, e.g., two, three, four, five, six, seven, eight, nine or ten times daily, weekly, monthly or yearly, or even once every 2 to 20 years. Persons of ordinary skill in the art easily estimate repetition rates for dosing for example based on measured residence times and concentrations of the drug in body fluids or tissues. Following successful treatment, it may be desirable to have the patient undergo maintenance therapy to prevent the recurrence of the disease state, wherein the oligonucleotide, protein and/or peptide with at least one polymer is administered in maintenance doses, ranging from 0.01 μg to 100 g per kg of body weight, once or more, e.g., two, three, four, five, six, seven, eight, nine or ten times daily, weekly, monthly or yearly, or even once every 2 to 20 years.

[0202] In one embodiment the at least one polymer linked with the oligonucleotide, protein and/or peptide is in a pharmaceutically acceptable carrier. The conjugate or compound in a pharmaceutically acceptable carrier is also referred to as pharmaceutical composition or composition.

[0203] A pharmaceutically acceptable carrier (excipient) is a pharmaceutically acceptable solvent, suspending emulsificant agent or any other pharmacologically inert vehicle for delivering the compound to an animal. The pharmaceutically acceptable carrier is for example liquid or solid and is selected with the planned manner of administration in mind so as to provide for the desired bulk, consistency, etc., when combined with a nucleic acid and the other components of a given pharmaceutical composition. Typical pharmaceutically acceptable carriers include, but are not limited to, binding agents (e.g. pregelatinized maize starch, polyvinylpyrrolidone or hydroxypropyl methylcellulose, etc.); fillers (e.g. lactose and other sugars, microcrystalline cellulose, pectin, gelatin, calcium sulfate, ethyl cellulose, polyacrylates or calcium hydrogen phosphate, etc.); lubricants (e.g., magnesium stearate, talcum, silica, colloidal silicon dioxide, stearic acid, metallic stearates, hydrogenated vegetable oils, corn starch, polyethyleneglycols, sodium benzoate, sodium acetate, etc.); disintegrates (e.g., starch, sodium starch glycolate, etc.); or wetting agents (e.g., sodium lauryl sulphate, etc.). Sustained release oral delivery systems and/or enteric coatings for orally administered dosage forms are described in U.S. Pat. Nos. 4,704,295; 4,556,552; 4,309,406; and 4,309,404. An adjuvant is included under these phrases.

[0204] Pharmaceutical compositions and formulations for topical administration include for example transdermal patches, pastes, ointments, lotions, creams, gels, drops, suppositories, globuli, sprays, liquids, and powders. Conventional pharmaceutical carriers, aqueous, powder or oily bases, thickeners and the like may be necessary or desirable. Coated condoms, gloves and the like may also be useful.

[0205] Compositions and formulations for oral administration include powders or granules, suspensions, emulsions, or solutions in water or non-aqueous media, capsules, sachets or tablets. In certain embodiments thickeners, flavoring agents, diluents, emulsifiers, dispersing aids or binders are used.

[0206] In other embodiments the pharmaceutical composition for parenteral, intrathecal, intracerebral (i.c.), or intraventricular administration include for example sterile aqueous solutions which in some embodiments contains buffers, diluents and other suitable additives such as penetration enhancers, carrier compounds and other pharmaceutically acceptable carriers or excipients.

[0207] In other embodiments the pharmaceutical composition also includes for example penetration enhancers in order to enhance the alimentary delivery of the oligonucleotide, protein and/or peptide. Penetration enhancers are for example classified as belonging to one of five broad categories, i.e., fatty acids, bile salts, chelating agents, surfactants and non-surfactants (Lee (1991), Muranishi (1990). One or more penetration enhancers from one or more of these broad categories are for example included in compositions according to the invention.

[0208] Various fatty acids and their derivatives which act as penetration enhancers include, for example, oleic acid, lauric acid, capric acid, myristic acid, palmitic acid, stearic acid, linoleic acid, linolenic acid, dicaprate, tricaprate, ricinoleate, monoolein (1-monooleoyl-rac-glycerol), dilaurin, caprylic acid, arachidonic acid, glyceryl 1monocaprate, 1-dodecylazacycloheptan-2-one, acylcarnitines, acylcholines, mono- and di-glycerides and physiologically acceptable salts thereof (i.e., oleate, laurate, caprate, myristate, palmitate, stearate, linoleate, etc.) (Lee (1991), Muranishi (1990), El-Hariri (1992). Examples of some presently preferred fatty acids are sodium caprate and sodium laurate, used singly or in combination at concentrations of 0.5 to 5%.

[0209] The physiological roles of bile include the facilitation of dispersion and absorption of lipids and fat-soluble vitamins (Brunton 1996). Various natural bile salts, and their synthetic derivatives, act as penetration enhancers. Thus, the term “bile salt” includes any of the naturally occurring components of bile as well as any of their synthetic derivatives. A presently preferred bile salt is chenodeoxycholic acid (CDCA) (Sigma Chemical Company, St. Louis, Mo.), generally used at concentrations of 0.5 to 2%.

[0210] In particular, complex formulations comprising one or more penetration enhancers are used. For example, bile salts are used in combination with fatty acids to make complex formulations. Preferred combinations include CDCA combined with sodium caprate or sodium laurate (generally 0.5 to 5%).

[0211] Chelating agents include, but are not limited to, disodium ethylenediaminetetraacetate (EDTA), citric acid, salicylates (e.g., sodium salicylate, 5-methoxysalicylate and homovanilate). N-acyl derivatives of collagen, laureth-9 and N-amino acyl derivatives of beta-diketones (enamines) (Lee (1991)), Muranishi (1990), Buur (1990). Chelating agents have for example the additional advantage of also serving as RNase inhibitors.

[0212] Surfactants include, for example, sodium lauryl sulfate, polyoxyethylene-9-lauryl ether and polyoxyethylene-20-cetyl ether (Lee (1991)), and perfluorochemical emulsions, such as FC-43 (Takahashi (1988)).

[0213] Non-surfactants include, for example, unsaturated cyclic ureas, 1-alkyl- and 1-alkenylazacyclo-alkanone derivatives (Lee (1991) and non-steroidal anti-inflammatory agents such as diclofenac sodium, indomethacin and phenylbutazone (Yamashita (1987)).

[0214] Regardless of the method by which the compounds of the invention are introduced into a patient, colloidal dispersion systems may be used as delivery vehicles to enhance the in vivo stability of the compounds and/or to target the compounds to a particular organ, tissue or cell type. Colloidal dispersion systems include, but are not limited to, macromolecule complexes, nanocapsules, nanospheres, microcapsules, microspheres, beads and lipid-based systems including oil-in-water emulsions, micelles, mixed micelles, liposomes and lipid-compound complexes of uncharacterized structure. A preferred colloidal dispersion system is a plurality of liposomes. Liposomes are microscopic spheres having an aqueous core surrounded by one or more outer layer(s) made up of lipids arranged in a bilayer configuration (Chonn (1995)).

[0215] In some embodiments of a pharmaceutical composition of this invention where an acid form exists, salt and ester forms are preferably formed from the acid, and all such forms are included within the meaning of the terms conjugate, compound or oligonucleotide, protein and/or peptide as used herein. Pharmaceutically acceptable salts shall mean non-toxic salts of the compounds employed in this invention which are generally prepared by reacting the free acid with a suitable organic or inorganic base, particularly those formed from cations such as sodium, potassium, aluminium, calcium, lithium, magnesium, zinc, and tetramethylammonium, as well as those salts formed from amines such as ammonia, ethylenediamine, N-methylglucamine, lysine, arginine, ornithine, choline. N,N′-dibenzylethylenediamine, chloroprocaine, diethanolamine, procaine. N-benzylphenethylamine, 1-p-chlorobenzyl-2-pyrrolidine-1′-yl-methylbenzimidazole, diethylamine, piperazine, and tris(hydroxymethyl)aminomethane.

### Therapy

[0216] The oligonucleotide, protein and/or peptide, e.g., an immunostimulator, linked with at least one polymer or a pharmaceutical composition comprising one or more conjugates or compounds of the present invention is suitable for controlling, preventing and/or treating diseases or disorders. In preferred embodiments the conjugate and compound, respectively, or the pharmaceutical composition is suitable for controlling, preventing and/or treating unwanted neoplasms such as cancer, carcinoma, fibrosis and/or eye diseases or disorders as well as for controlling, preventing and/or treating of a viral disease or disorder such as HIV. Further the invention is directed to the use of a conjugate or compound, or of a pharmaceutical composition according to the present invention for controlling, preventing and/or treating a disease or disorder, wherein the disease or disorder is selected from the group of cancer, fibrosis, and viral disease or disorder.

[0217] In a preferred example the pharmaceutical composition comprises at least one oligonucleotide, protein and/or peptide, e.g., an immunostimulator linked with at least one polymer. Preferably, the pharmaceutical composition is produced by a method, wherein the conjugate or compound is produced according to a method of the present invention and the addition of a pharmaceutically acceptable carrier. Optionally, the pharmaceutical composition further comprises an active substance, a chelating agent, a surfactant, a fatty acid, a penetration enhancer, an emulsificant agent, a lubricant, etc.

[0218] The neoplasms, cancers or carcinomas controllable, preventable and/or treatable with an oligonucleotide, a protein and/or a peptide for example an immunostimulator comprising at least one oligonucleotide, protein and/or peptide, e.g., an immunostimulator, linked with at least one polymer or a pharmaceutical composition comprising or consisting of such conjugate include, but are not limited to solid tumors, blood born tumors such as leukemias, acute or chronic myelotic or lymphoblastic leukemia, tumor metastasis, benign tumors, for example hemangiomas, acoustic neuromas, neurofibromas, trachomas, pyogenic granulomas, pre-malignant tumors, rheumatoid arthritis, psoriasis, astrocytoma, acoustic neuroma, blastoma, craniopharyngioma, ependymoma. Ewing's tumor, medulloblastoma, glioma, hemangioblastoma. Hodgkins-lymphoma, medulloblastoma, leukaemia, mesothelioma, neuroblastoma, neurofibroma, non-Hodgkins lymphoma, pinealoma, retinoblastoma, sarcoma (including angiosarcoma, chondrosarcoma, endothelialsarcoma, fibrosarcoma, leiomyosarcoma, liposarcoma, lymphangioendotheliosarcoma, lymphangiosarcoma, melanoma, meningioma, myosarcoma, oligodendroglioma, osteogenic sarcoma, osteosarcoma), seminoma, trachomas. Wilm's tumor, or is selected from the group of bile duct carcinoma, bladder carcinoma, brain tumor, breast cancer, bronchogenic carcinoma, carcinoma of the kidney, cervical cancer, choriocarcinoma, cystadenocarcinoma, embryonal carcinoma, epithelial carcinoma, esophageal cancer, cervical carcinoma, colon carcinoma, colorectal carcinoma, endometrial cancer, gallbladder cancer, gastric cancer, head cancer, liver carcinoma, lung carcinoma, medullary carcinoma, neck cancer, non-small-cell bronchogenic/lung carcinoma, ovarian cancer, pancreas carcinoma, papillary carcinoma, papillary adenocarcinoma, prostate cancer, small intestine carcinoma, prostate carcinoma, rectal cancer, renal cell carcinoma, skin cancer, small-cell bronchogenic/lung carcinoma, squamous cell carcinoma, sebaceous gland carcinoma, testicular carcinoma, uterine cancer.

[0219] The conjugates of the invention as well as the pharmaceutical compositions comprising one or more such conjugates are also suitable to control, prevent and/or treat a variety of immune disorders such as autoimmune diseases or disorders, e.g., diabetes mellitus, arthritis, including rheumatoid arthritis, juvenile rheumatoid arthritis, osteoarthritis, psoriatic arthritis; multiple sclerosis, encephalomyelitis, myasthenia gravis, systemic lupus erythematosis, autoimmune thyroiditis, dermatitis, including atopic dermatitis, eczematous dermatitis; psoriasis, Sjogren's Syndrome, Crohn's disease, aphthous ulcer, iritis, conjunctivitis, keratoconjunctivitis, ulcerative colitis, asthma, allergic asthma, cutaneous lupus erythematosus, scleroderma, vaginitis, proctitis, drug eruptions, leprosy reversal reactions, erythema nodosum leprosum, autoimmune uveitis, allergic encephalomyelitis, acute necrotizing hemorrhagic encephalopathy, idiopathic bilateral progressive sensorineural hearing loss, aplastic anemia, pure red cell anemia, idiopathic thrombocytopenia, polychondritis. Wegener's granulomatosis, chronic active hepatitis. Stevens-Johnson syndrome, idiopathic sprue, lichen planus. Graves' disease, sarcoidosis, primary biliary cirrhosis, uveitis posterior, and interstitial lung fibrosis, graft-versus-host disease, cases of transplantation, and allergy such as an atopic allergy. The conjugate or pharmaceutical compositions are also suitable to control, prevent and/or treat cardiovascular diseases or disorders such as hypertension, atherosclerosis, coronary artery spasm, congestive heart failure, coronary artery disease, valvular disease, arrhythmias, and cardiomyopathies; or viral diseases or disorders for example hepatitis A (HVA), hepatitis B (HVB), hepatitis C (HVC), or caused by herpes simplex virus (HSV), HIV, FIV, poliovirus, influenza virus, adenoviruses, papillomaviruses. Epstein-Barr-viruses and small pox virus, or virus-associated cancer such as hepatocellular cancer.

[0220] The conjugates of the invention as well as the pharmaceutical compositions comprising one or more such conjugates are further suitable to control, prevent and/or treat fibrotic diseases or disorders which are for example associated with undesired TGF-beta signaling, which include, without limitation, kidney disorders and (excessive) fibrosis and/or sclerosis, such as glomerulonephritis (GN) of all etiologies, e.g., mesangial proliferative GN, immune GN, crescentic GN; diabetic nephropathy, renal interstitial fibrosis and all causes of renal interstitial fibrosis including hypertension, renal fibrosis resulting from complications of drug exposure, including cyclosporin treatment of transplant recipients. HIV-associated nephropathy, or transplant nephropathy; hepatic diseases associated with (excessive) scarring and (progressive) sclerosis for example cirrhosis due to all etiologies, disorders of the biliary tree, and hepatic dysfunction; pulmonary fibrosis with consequential loss of gas exchange or ability to efficiently move air into and out of the lungs such as adult respiratory distress syndrome (ARDS), chronic obstructive pulmonary disease (COPD), idiopathic pulmonary fibrosis (IPF), acute lung injury (ALI) or pulmonary fibrosis due to infectious or toxic agents such as smoke, chemicals, allergens, or autoimmune diseases; eye diseases or disorders associated with fibroproliferative states such as fibroproliferative vitreoretinopathy of any etiology or fibrosis associated with ocular surgery, e.g., treatment of glaucoma, retinal reattachment, cataract extraction, or drainage procedures of any kind; excessive or hypertrophic scar formation in the dermis occurring for example during wound healing resulting from trauma or surgical wounds.

[0221] The following examples will serve to further illustrate the present invention without, at the same time, however, constituting any limitation thereof. To the contrary, it is to be clearly understood that resort may be had to various other embodiments, modifications, and equivalents thereof which, after reading the description herein, may suggest themselves to those skilled in the art without departing from the spirit of the invention. In particular, methods described for the modification of the 5′- or the 3′-terminus of the oligonucleotide, the N-terminus or the C-terminus of the protein and/or peptide are combinable for the production of conjugates modified on both ends. Additionally, methods disclosed for the production of 5′3′- or N-/C-terminal-modified conjugates are variable in a way that only one end is modified or one end and a sugar moiety, a base, a NH— or SH-group etc. is modified.

### EXAMPLES

### Example 1

### Synthesis of a 5′-PEGylated Oligonucleotide

### 1) Synthesis of DMT-PEG 200, -300, -400, -500, -600, -700, -800, -900, -1000, -1250, -1500, -1750, -2000, -2250, -2500, -2750, -3000, -3250, -3500, -3750, -4000, -4250, -4500, -4750, -5000, -10000, -20000, -50000 or -1000000

### DMT=Dimethoxytrityl

[0222] PEG 200, -300, -400, -500, -600, -700, -800, -900, -1000, -1250, -1500, -1750, -2000, -2250, -2500, -2750, -3000, -3250, -3500, -3750, -4000, -4250, -4500, -4750 or -5000, -10000, -20000, -50000 or -1000000 (20.0 mmol) was evaporated twice from 5 ml pyridine (dried with molecular sieve) and dried in vacuo 4 days over P₄O₁₀. The PEG 200, -300, -400, -500, -600, -700, -800, -900, -1000, -1250, -1500, -1750, -2000, -2250, -2500, -2750, -3000, -3250, -3500, -3750, -4000, -4250, -4500, -4750, -5000, -10000, -20000, -50000 or -1000000 was dissolved in dichloromethane (5 ml, refluxed and distilled with CaH₂) and triethylamine (7.21 mmol, refluxed and distilled with CaH₂) and 4-dimethyl-aminopyridine (0.21 mmol) were added. Subsequently 4,4′-dimethoxytriphenylmethyl chloride (4.5 mmol) was added within 1 hour and the mixture was stirred for 24 hours in the dark. The mixture was diluted with 50 ml dichloromethane and extracted twice with 25 ml 5% sodium hydrogencarbonate and once with 25 ml water. The organic phase was dried (Na₂SO₄) and concentrated by rotary evaporation.

[0223] The mixture was purified by column chromatography silica gel 60 (diameter 0.063-0.100 mm) with the solvent:chloroform:methyl alcohol:triethylamine (96.5:3:0.5). The product was identified by NMR.

2) Synthesis of DMT-PEG 200, -300, -400, -500, -600, -700, -800, -900, -1000, -1250, -1500, -1750, -2000, -2250, -2500, -2750, -3000, -3250, -3500, -3750, -4000, -4250, -4500, -4750, -5000, -10000, -20000, -50000 or -1000000-phosphoramidite:

[0224] DMT-PEG 200, -300, -400, -500, -600, -700, -800, -900, -1000, -1250, -1500, -1750, -2000, -2250, -2500, -2750, -3000, -3250, -3500, -3750, -4000, -4250, -4500, -4750, -5000, -10000, -20000, -50000 or -1000000 (0.41 mmol) was evaporated twice from 30 ml pyridine (dried with molecular sieve)/dichloromethane (refluxed and distilled with CaH₂) at a ratio of 1:10 and dried in vacuo 6 days over P₄O₁₀. The DMT-PEG 200, -300, -400, -500, -600, -700, -800, -900, -1000, -1250, -1500, -1750, -2000, -2250, -2500, -2750, -3000, -3250, -3500, -3750, -4000, -4250, -4500, -4750, -5000, -10000, -20000, -50000 or -1000000 was dissolved in dichloromethane (970 μl, refluxed and distilled with CaH₂) and diisopropylethylamine (1.65 mmol, refluxed and distilled with CaH₂) and 2-cyanoethyl-diisopropylchlorophosphoramidite (0.63 mmol) was added. The mixture was stirred for 30 minutes in the dark (reaction detection by thin layer chromatography (TLC): silica gel 60 F₂₅₄, dichloromethane/ethyl acetate/triethylamine, 45/45/10). Methyl alcohol (20 μl, distilled with magnesium) was added. The mixture was diluted with 6 ml dichloromethane and extracted twice with 10 ml 5% sodium hydrogencarbonate and twice with 10 ml distilled water. The organic phase was dried (Na₂SO₄) and concentrated by rotary evaporation.

[0225] The mixture was purified by chromatography (silica gel 60 (0.040-0.063 mm); dichloromethane/ethyl acetate/triethylamine, 45/45/10). The product was identified by NMR.

3) Synthesis of 5′-PEG 200, -300, -400, -500, -600, -700, -800, -900, -1000, -1250, -1500, -1750, -2000, -2250, -2500, -2750, -3000, -3250, -3500, -3750, -4000, -4250, -4500, -4750, -5000, -10000, -20000, -50000 or -1000000-oligonucleotide conjugates:

[0226] The oligonucleotide was synthesized by standard phosphoramidite chemistry on 1000 Å adenosine-CPG (10 micromol, loading 38 micromol/g support using a Expedite Synthesizer (PerSeptive Biosystems). The 5′-OH of the oligonucleotide was PEGylated by using the DMT-PEG 400-phosphoramidite (50 mg/ml acetonitrile) on the Synthesizer. In order to calculate the loading of DMT-groups, an aliquote was taken, 0.1M toluene-4-sulfonic acid was added and the absorption of the cleavaged DMT-cations were determinated at 260 nm (loading: 11.2 μmol). The product was cleaved from the support and deprotected by using 32% NH₃ at 55° C. for 16 h. The crude product was dried and purified by reversed-phase HPLC (TOSOHAAS, Amberchrom CG-300S (reversed phase), 35 μm; 125×4.7 mm; acetonitrile /0.1 M triethylammonium acetate pH 7.5). The oligonucleotide was detritylated by using 80% acetic acid at room temperature for 15 min, desalted by using a NAP-10-Column (Amersham Biosciences) and lyophilized.

[0227] The conjugates resulting from different experiments were: PEG 400-oligonucleotide, PEG 600-oligonucleotide, PEG 800-oligonucleotide, PEG 1000-oligonucleotide, PEG 1500-oligonucleotide, PEG 2000-oligonucleotide, PEG 5000-oligonucleotide, PEG 20000-oligonucleotide, and PEG 50000-oligonucleotide.

### Analysis:

[0228] a) MALDI-TOF: Matrix: 3-hydroxypicolinic acid, reflector-mode, molecular weight was determined
b) Capillary gel electrophoresis: capillary: fused silica capillary, 40 cm, inner diameter: 100 μm, external diameter: 360 μm, buffer: 10% buffer solution pH 2.5 for HPCE (0.1 M sodium phosphate-buffer) and 90% 0.1% (hydroxypropyl)methyl cellulose in water, sample: 10 pmol oligonucleotide/μl (in water), voltage: 8 kV, polarity: from − to +, run time: 30 min, run: capillary was rinsed under pressure, 60 sec with 0.1M NaOH (filtered 0.2 μm), 120 sec with buffer, sample injection (5 sec. with pressure), results: broad peak at 20.5 min

### Example 2

### Synthesis of a 5′-PEGylated Oligonucleotide (FIG. 8)

### 1) Oligonucleotide Synthesis:

[0229] Oligonucleotides were synthesized by phosphoramidite chemistry, wherein the 5′-terminus of the oligonucleotide is aminofunctionalized, i.e., the 5′-terminus comprises a functional group which is an amino group.

### 2) Synthesis of NHS-Ester PEG 200, -300, -400, -500, -600, -700, -800, -900, -1000, -1250, -1500, -1750, -2000, -2250, -2500, -2750, -3000, -3250, -3500, -3750, -4000, -4250, -4500, -4750, -5000, -10000, -20000, -50000 or -1000000:

[0230] The NHS-ester PEG 200, -300, -400, -500, -600, -700, -800, -900, -1000, -1250, -1500, -1750, -2000, -2250, -2500, -2750, -3000, -3250, -3500, -3750, -4000, -4250, -4500, -4750-5000, -10000, -20000, -50000 or -1000000 is producable according to any method known in the art.

### 3) Synthesis of 5′-PEG 200, -300, -400, -500, -600, -700, -800, -900, -1000, -1250, -1500, -1750, -2000, -2250, -2500, -2750, -3000, -3250, -3500, -3750, -4000, -4250, -4500, -4750, -5000, -10000, -20000, -50000 or -1000000-Oligonucleotide Conjugates:

[0231] The 5′-terminus aminofunctionalized oligonucleotide is dissolved in reaction buffer (60% 0.3 M NaHCO₃, pH 8.5/40% DMF), for example 1 μmol oligonucleotide in 1.6 ml reaction buffer (0.625 μmol/ml), and warmed up to 37° C. In the following 28 μmol NHS-ester PEG 200, -300, -400, -500, -600, -700, -800, -900, -1000, -1250, -1500, -1750, -2000, -2250, -2500, -2750, -3000, -3250, -3500, -3750, -4000, -4250, -4500, -4750, -5000, -10000, -20000, -50000 or -1000000 is added step by step within 2 h to the 37° C. oligonucleotide. After all the NHS-ester is added to the oligonucleotide, the sample is incubated for 16 h at 37° C. on a shaker (100 rpm). In the following the sample is dried in a SpeedVac.

a) Alternative I: The dried sample is dissolved in 1 ml 0.01 M TEAA pH 7.5 and purified on an ion exchange FPLC (IE-FPLC) to remove the hydrolyzed NHS and PEG 200, -300, -400, -500, -600, -700, -800, -900, -1000, -1250, -1500, -1750, -2000, -2250, -2500, -2750, -3000, -3250, -3500, -3750, -4000, -4250, -4500, -4750, -5000, -10000, -20000, -50000 or -1000000. A suitable ion exchange column is for example Toyopearl SuperQ-650M 150×16 mm, the elution buffer is 0.01 M TEAA+2 M NaCl pH 7.5, and the flow rate is 4 ml/min. Afterwards the sample is desalted via ultrafiltration using an ultrafiltration membrane of MWCO 1000 Da and a pressure of 4 bar N₂ to reduce or remove the NaCl concentration. The desalted sample is dried in a SpeedVac at room temperature.
b) Alternative II: The dried sample is dissolved in 1 ml 0.01 M TEAA pH 7.5 and purified via reversed-phase HPLC to remove the hydrolyzed NHS and PEG 200, -300, -400, -500, -600, -700, -800, -900, -1000, -1250, -1500, -1750, -2000, -2250, -2500, -2750, -3000, -3250, -3500, -3750, -4000, -4250, -4500, -4750, -5000, -10000, -20000, -50000 or -1000000. The column used is a Phenomenex Polymerx RP1 100 Å 10×250 mm, which is equilibrated with 0.1 M TEAA pH 7.5, and the sample is eluted with acetonitril. The sample comprising the PEG conjugated oligonucleotide is dried in a SpeedVac and afterwards the dried sample is dissolved in 100 μl 1 M sodium acetate solution and 1.9 ml water. The sample is finally dried again in a SpeedVac.
c) Alternative III: After all the NHS-ester is added to the oligonucleotide, the sample is incubated for 16 h at 37° C. on a shaker (100 rpm); in the following the volume of the sample is reduced to 0.5 ml in a SpeedVac to reduce the DMF content. 2.5 ml water is added to the 0.5 ml sample, which is then purified via IE-FPLC (see alternative I). The buffer system used for alternative III is buffer A: 0.01 M NaHCO₃ pH 8.5 and buffer B: 0.001 M NaHCO₃+2 M NaCl pH 8.5 using a flow rate of 4 ml/min Afterwards the sample comprising the PEG conjugated oligonucleotide is desalted via ultrafiltration using an ultrafiltration membrane of MWCO 1000 Da and a pressure of 3.2 bar Ar to reduce or remove the NaCl and NaHCO₃ concentration. Finally, the sample is dried in a SpeedVac.

### Analysis:

[0232] MALDI-TOF: Matrix: 3-hydroxypicolinic acid, reflector-mode, molecular weight was determined.

### Example 3

### Synthesis of a 5′-PEGylated Oligonucleotide via PEG-Amidite

### 1) Oligonucleotide Synthesis:

[0233] The oligonucleotide is synthesized by phosphoramidite chemistry, wherein the 5′-terminus of the oligonucleotide is DMT protected.

2) Synthesis of PEG-200, -300, -400, -500, -600, -700, -800, -900, -1000, -1250, -1500, -1750, -2000, -2250, -2500, -2750, -3000, -3250, -3500, -3750, -4000, -4250, -4500, -4750, -5000, -10000, -20000, -50000 or -1000000-Amidite: PEG-Amidite is Commercially Available.

### 3) Synthesis of 5′-PEG 200, -300, -400, -500, -600, -700, -800, -900, -1000, -1250, -1500, -1750, -2000, -2250, -2500, -2750, -3000, -3250, -3500, -3750, -4000, -4250, -4500, -4750, -5000, -10000, -20000, -50000 or -1000000-Oligonucleotide Conjugates:

[0234] Once the oligonucleotide is synthesized on the CPG support, the PEG-amidite is added and a further coupling cycle is performed on the oligonucleotide synthesizer. Afterwards the PEGylated oligonucleotide is cleaved from the support by incubation of the conjugate with 700 μl ammoniac for 16 h at 40° C. In the following the conjugate is dried in a SpeedVac and the pellet is dissolved in 200 μl 0.1 M TEAA pH 7.5 and is finally purified via reverse phase HPLC (Phenomenex Jupiter 5μ C18 column 300 Å 4.6×250 mm, buffer A: 0.1 M TEAA pH 7.5, buffer B: acetonitrile). The conjugate is dried in a SpeedVac, desalted and dried again.

### Example 4

### Synthesis of a 3′-PEGylated Oligonucleotide

### 1) Succinylation of Controlled Pore Glass (CPG) Support:

[0235] Succinic anhydride (44 μmol) and 4-dimethylaminopyridine (22 μmol) were dissolved in pyridine (440 μl). The mixture was added to aminopropylated CPG support (4.4 μmol) and mixed at room temperature. After 20 h the solvent was removed and the CPG-support was washed five times with 1 ml dichloromethane and three times with 1 ml acetonitrile. For testing of unreacted amino group, an aliquot (approx. 1 mg) of CPG-support was taken and 50 μl of a ninhydrin-solution (50 mg ninhydrin/ml ethanol) was added. After 10 minutes at 55° C. no colour was detected.

### 2) PEGylation of the Succinylated CPG Support:

[0236] 2-(1H-benzotriazole-1-yl)-1,1,3,3-tetramethyluronium hexafluorophosphate (HBTU, 1.5 mmol), 4-dimethylaminopyridine (1.5 mmol) and diisopropylethylamine (1.5 mmol) were dissolved in acetonitrile (11.25 ml). The mixture was added to the succinylated CPG support (combined, see 1); approx. 13.2 μmol). Subsequently PEG 200, -300, -400, -500, -600, -700, -800, -900, -1000, -1250, -1500, -1750, -2000, -2250, -2500, -2750, -3000, -3250, -3500, -3750, -4000, -4250, -4500, -4750, -5000, -10000, -20000, -50000 or -1000000 (6.36 mmol) was added and the mixture was mixed at room temperature. After 20 h the solution was removed and the CPG-support was washed three times with 15 ml dichloromethane and three times with 15 ml acetonitrile.

### 3) Oligonucleotide Synthesis:

[0237] Oligonucleotides were synthesized by phosphoramidite chemistry on the PEGylated-CPG support using a Expedite Synthesizer. The product was cleaved from the support and deprotected by using 32% NH₃ at 55° C. for 16 h. The crude product was dried and purified by reversed-phase HPLC (TOSOHAAS, Amberchrom CG-300S (reversed phase), 35 μm; 125×4.7 mm; acetonitrile/0.1M triethylammonium acetate pH 7.5). The oligonucleotide was detritylated by using 80% acetic acid at room temperature for 15 min, desalted by using a NAP-10-Column (Amersham Biosciences) and lyophilized.

[0238] The conjugates resulting from different experiments were: 3′-PEG 400-oligonucleotide, 3′-PEG 600-oligonucleotide, 3′-PEG 800-oligonucleotide, K-PEG 1000-oligonucleotide, 3′-PEG 1500-oligonucleotide, 3′-PEG 2000-oligonucleotide, 3′-PEG 5000-oligonucleotide, 3′-PEG 20000-oligonucleotide, and 3′-PEG 50000-oligonucleotide.

### Analysis:

[0239] a) MALDI-TOF: Matrix: 3-hydroxypicolinic acid, reflector-mode, molecular weight was determined
b) capillary gel electrophoresis: capillary: fused silica capillary, 40 cm, inner diameter: 100 μm, external diameter: 360 μm, buffer: 10% buffer solution pH 2.5 for HPCE (0.1 M sodium phosphate buffer), 90%, 0.1% (hydroxypropyl)methyl cellulose in water voltage: 8 kV; polarity: from − to +; run time: 30 min; concentration of the sample: about 10 pmol oligonucleotide/μl (in water), Method: I) capillary preparation: capillary was rinsed under pressure: 360 sec with water (distilled, filtered pore diameter 0.2 μm), 120 sec. with 0.1 M NaOH (filtrated pore diameter 0.2 μm), 360 sec with water (distilled, filtrated pore diameter 0.2 μm)
II) run: capillary was rinsed under pressure: 60 sec. with 0.1M NaOH (filtrated 0.2 μm) 120 sec. with buffer; sample injection (5 sec. with pressure); result: broad peak at 20 min.

### Example 5

### Synthesis of a 3′-PEGylated Oligonucleotide

### 1) Oligonucleotide Synthesis:

[0240] The oligonucleotide is synthesized on a PT 3′-aminomodifier C6 CPG or 3′-aminomodifier C7 CPG, for example of Glen, or Amino On CPG, for example of Proligo (which all comprise an amino linker). The synthesis protocol is the standard base coupling protocol for thiolates. Once the oligonucleotide is synthesized, the conjugate is cleaved from the support by incubation with 700 μl ammoniac for 12 h at 40° C. Afterwards the sample is dried in a SpeedVac and the pellet is resolved in 100 μl water. The sample is then purified via a reverse phase HPLC (Phenomenex Jupiter 5μ C18 column 300 Å 4.6×250 mm, buffer A: 0.1 M TEAA pH 7.5, buffer B: acetonitrile) and dried again. In the following the sample is resolved again in 200 μl 80% acetic acid, desalted via a NAP column and dried in a SpeedVac.

### 2) Synthesis of 3′-PEG 200, -300, -400, -500, -600, -700, -800, -900, -1000, -1250, -1500, -1750, -2000, -2250, -2500, -2750, -3000, -3250, -3500, -3750, -4000, -4250, -4500, -4750, -5000, -10000, -20000, -50000 or -1000000-Oligonucleotide Conjugates:

[0241] The purified 3′-aminomodified oligonucleotide is incubated with 12.5× molar excess of PEG 200, -300, -400, -500, -600, -700, -800, -900, -1000, -1250, -1500, -1750, -2000, -2250, -2500, -2750, -3000, -3250, -3500, -3750, -4000, -4250, -4500, -4750 or -5000, -10000, -20000, -50000 or -1000000-NHS in reaction buffer (DMF/NaHCO₃ pH 8.5, 40:60) or 20 μl DMF/1 μl DIEA). 180 μl water are added to stop the reaction and the sample is purified via reverse phase HPLC (Phenomenex Jupiter 5μ C18 column 300 Å 4.6×250 mm, buffer A: 0.1 M TEAA pH 7.5, buffer B: acetonitrile). Finally the sample is lyophilized.

### Example 6

### Synthesis of a 3′5′-PEGylated Oligonucleotide

### 1) Succinylation of Controlled Pore Glass (CPG) Support:

[0242] Succinic anhydride (44 μmol) and 4-di(methyl)aminopyridine (22 μmol) were dissolved in pyridine (440 μl). The mixture was added to aminopropylated CPG-support (4.4 μmol, loading: 44 μmol) and mixed at room temperature. After 22 h the solution was removed and the CPG-support was washed five times with 1 ml dichlormethane and three times with 1 ml acetonitrile. For testing for unreacted amino groups, an aliquot (approx. 1 mg) of CPG-support was taken and 50 μl of a ninhydrin-solution (50 mg ninhydrin/ml ethanol) was added. After 10 minutes at 55° C. no colour was detected indicating no free amino groups.

### 2) PEGylation of the Succinylated CPG Support:

[0243] 2-(1H-benzotriazole-1-yl)-1,1,3,3-tetramethyluronium hexafluorophosphate (HBTU, 3.0 mmol), 4-di(methyl)aminopyridine (3.0 mmol) and diisopropylethylamine (3.0 mmol) were dissolved in acetonitrile (22.5 ml). The mixture was added to the succinylated CPG-support (approx. 26.4 μmol), Subsequently, PEG 200, -300, -400, -500, -600, -700, -800, -900, -1000, -1250, -1500, -1750, -2000, -2250, -2500, -2750, -3000, -3250, -3500, -3750, -4000, -4250, -4500, -4750, -5000, -10000, -20000, -50000 or -1000000 (12.7 mmol) was added and the mixture was mixed at room temperature. After 24 h the solvent was removed and the CPG support was washed three times with 10 ml dichloromethane and three times with 10 ml acetonitrile.

### 3) 3′-PEGylated Oligonucleotide Synthesis:

[0244] Oligonucleotides were synthesized according to phosphoramidite chemistry on the PEGylated-CPG support using a Expedite Synthesizer. For more details see also R. Schlingensiepen (1997). In order to calculate the loading of DMT-groups, an aliquote was taken, 0.1M toluene-4-sulfonic acid was added and the absorption of the cleavaged DMT-cations was determinated at 260 nm (loading: 16.8 μmol).

### 4) 5′-PEGylation of the Oligonucleotides:

[0245] The oligonucleotides were PEGylated by using DMT-PEG 200, -300, -400, -500, -600, -700, -800, -900, -1000, -1250, -1500, -1750, -2000, -2250, -2500, -2750, -3000, -3250, -3500, -3750, -4000, -4250, -4500, -4750, -5000, -10000, -20000, -50000 or -1000000-phosphoramidite in acetonitrile (dry) on the Expedite Synthesizer. For calculating the loading of DMT-groups, an aliquote was taken, 0.1M toluene-4-sulfonic acid was added and the absorption of the cleavaged DMT-cations was determinated at 260 nm (loading: 6.3 μmol).

[0246] The product was cleaved from the support and deprotected by using 32% NH₃ at 55° C. for 16 h. The crude product was dried and purified by reversed-phase HPLC (TOSOHAAS, Amberchrom CG-300S (reversed phase), 35 μm; 125×4.7 mm; acetonitrile/0.1 M triethylammonium acetate pH 7.5). The oligonucleotide was detritylated by using 80% acetic acid at room temperature for 15 min, desalted by using a NAP-10-Column (Amersham Biosciences) and lyophilized.

[0247] Preferred final products in different experiments were 3′5′- or 5′3′-PEGylated oligonucleotides having the following structure: PEG 200-oligonucleotide-PEG 200, PEG 300-oligonucleotide-PEG 300, PEG 400-oligonucleotide-PEG 400, PEG 500-oligonucleotide-PEG 500, PEG 600-oligonucleotide-PEG 600, PEG 700-oligonucleotide-PEG 700, PEG 800-oligonucleotide-PEG 800. PEG 900-oligonucleotide-PEG 900, PEG 1000-oligonucleotide-PEG 1000, PEG 1250-oligonucleotide-PEG 1250, PEG 1500-oligonucleotide-PEG 1500, PEG 1750-oligonucleotide-PEG 1750, PEG 2000-oligonucleotide-PEG 2000, PEG 2250-oligonucleotide-PEG 2250. PEG 2500-oligonucleotide-PEG 2500, PEG 2750-oligonucleotide-PEG 2750. PEG 3000-oligonucleotide-PEG 3000, PEG 3250-oligonucleotide-PEG 3250. PEG 3500-oligonucleotide-PEG 3500, PEG 3750-oligonucleotide-PEG 3750. PEG 4000-oligonucleotide-PEG 4000, PEG 4250-oligonucleotide-PEG 4250. PEG 4500-oligonucleotide-PEG 4500, PEG 4750-oligonucleotide-PEG 4750, PEG 5000-oligonucleotide-PEG 5000, PEG 200-oligonucleotide-PEG 500, PEG 200-oligonucleotide-PEG 600, PEG 200-oligonucleotide-PEG 700, PEG 200-oligonucleotide-PEG 800, PEG 200-oligonucleotide-PEG 900, PEG 200-oligonucleotide-PEG 1000, PEG 300-oligonucleotide-PEG 500, PEG 300-oligonucleotide-PEG 600, PEG 300-oligonucleotide-PEG 800. PEG 300-oligonucleotide-PEG 1000, PEG 300-oligonucleotide-PEG 1500, PEG 300-oligonucleotide-PEG 2000, PEG 400-oligonucleotide-PEG 600, PEG 400-oligonucleotide-PEG 800, PEG 400-oligonucleotide-PEG 1000, PEG 400-oligonucleotide-PEG 1500. PEG 400-oligonucleotide-PEG 2000, PEG 400-oligonucleotide-PEG 5000, PEG 400-oligonucleotide-PEG 20000, PEG 400-oligonucleotide-PEG 50000, PEG 500-oligonucleotide-PEG 800, PEG 500-oligonucleotide-PEG 1000, PEG 500-oligonucleotide-PEG 1250. PEG 500-oligonucleotide-PEG 1500, PEG 500-oligonucleotide-PEG 1750, PEG 500-oligonucleotide-PEG 2000, PEG 500-oligonucleotide-PEG 2250, PEG 500-oligonucleotide-PEG 2500, PEG 500-oligonucleotide-PEG 5000, PEG 600-oligonucleotide-PEG 800. PEG 600-oligonucleotide-PEG 1500, PEG 600-oligonucleotide-PEG 2000, PEG 600-oligonucleotide-PEG 5000, PEG 600-oligonucleotide-PEG 20000, PEG 600-oligonucleotide-PEG 50000, PEG 800-oligonucleotide-PEG 1500, PEG 800-oligonucleotide-PEG 2000. PEG 800-oligonucleotide-PEG 5000, PEG 800-oligonucleotide-PEG 20000, PEG 800-oligonucleotide-PEG 50000, PEG 1000-oligonucleotide-PEG 2000, PEG 1000-oligonucleotide-PEG 5000, PEG 1000-oligonucleotide-PEG 20000, PEG 1000-oligonucleotide-PEG 50000. PEG 1000-oligonucleotide-PEG 5000, PEG 1500-oligonucleotide-PEG 20000. PEG 1500-oligonucleotide-PEG 50000, PEG 2000-oligonucleotide-PEG 5000. PEG 2000-oligonucleotide-PEG 20000, PEG 2000-oligonucleotide-PEG 50000. PEG 2000-oligonucleotide-PEG 75000, PEG 2000-oligonucleotide-PEG 100000. PEG 5000-oligonucleotide-PEG 20000, PEG 5000-oligonucleotide-PEG 50000. PEG 5000-oligonucleotide-PEG 75000 or PEG 5000-oligonucleotide-PEG 1000000.

### Analysis:

[0248] a) MALDI-TOF: Matrix: 3-hydroxypicolinic acid, reflector-mode, molecular weight was determined
b) Capillary gel electrophoresis: capillary: fused silica capillary, 40 cm, inner diameter: 100 μm, external diameter: 360 μm, buffer: 10% buffer solution pH 2.5 for HPCE (0.1 M sodium phosphate buffer), and 90% 0.1% (hydroxypropyl)methyl cellulose in water; sample: 10 pmol oligonucleotide/μl (in water); voltage: 8 kV; polarity: from − to +; run time: 30 min; run: capillary was rinsed under pressure, 60 sec with (0.1M NaOH (filtered 0.2 μm), 120 sec with buffer, sample injection (5 sec with pressure), results: broad peak at 21 min

### Example 7

### Synthesis of a 3′5′-PEGylated Oligonucleotide via Conjugation in Solution

### 1) Oligonucleotide Synthesis:

[0249] Oligonucleotides were synthesized by phosphoramidite chemistry, the standard CPG method, wherein the 3′- and 5′-termini of the oligonucleotide is aminofunctionalized, i.e., the 5′-terminus comprises a functional group, which is an amino group. The aminofunctionalized 5′-end of the oligonucleotide comprising an amino linker at the 5′-terminus is temporarily protected by a trityl group for example monomethoxytrityl (MMT).

### 2) Synthesis of NHS-Ester PEG 200, 300, 400, 500, 600, 700, 800, 900, 1000, 1250, 1500, 1750, 2000, 2250, 2500, 2750, 3000, 3250, 3500, 3750, 4000, 4250, 4500, 4750, 5000, 10000, 20000, 50000 or 1000000:

[0250] The NHS-ester PEG 200, 300, 400, 500, 600, 700, 800, 900, 1000, 1250, 1500, 1750, 2000, 2250, 2500, 2750, 3000, 3250, 3500, 3750, 4000, 4250, 4500, 4750, 5000, 10000, 20000, 50000 or 1000000 is producable according to any method known in the art.

### 3) Synthesis of 3′-PEG 200, 300, 400, 500, 600, 700, 800, 900, 1000, 1250, 1500, 1750, 2000, 2250, 2500, 2750, 3000, 3250, 3500, 3750, 4000, 4250, 4500, 4750, 5000, 10000, 20000, 50000 or 1000000-Oligonucleotide Conjugates:

[0251] The 5′-terminus protected oligonucleotide (21 nmol) is incubated with a 24 times excess of NHS-ester PEG 200, 300, 400, 500, 600, 700, 800, 900, 1000, 1250, 1500, 1750, 2000, 2250, 2500, 2750, 3000, 3250, 3500, 3750, 4000, 4250, 4500 or 4750, 5000, 10000, 20000, 50000 or 1000000 in 100 μl reaction buffer (60% 0.3 M NaHCO₃ pH 8.5/40% DMF). The sample is incubated for 17 h at 37° C. on a shaker (200 rpm). In the following the sample is optionally deprotected and dried in a SpeedVac and dissolved in 60 μl water. Afterwards the sample is purified by HPLC. Finally, the conjugate is desalted via ultrafiltration and dried in a SpeedVac.

### 4) 5′-PEGylation of the 3′-PEGylated Oligonucleotide:

[0252] In case the protecting group was not removed under step 3, the protecting group of the 5′-end is removed and purified. The 3′-PEGylated oligonucleotide is dissolved in water and is incubated with an excess of PEG 200, 300, 400, 500, 600, 700, 800, 900, 1000, 1250, 1500, 1750, 2000, 2250, 2500, 2750, 3000, 3250, 3500, 3750, 4000, 4250, 4500, 4750, 5000, 10000, 20000, 50000 or 1000000-NHS-ester for 17 h at 40° C. Afterwards, the sample is purified via a HPLC and FPLC. In the following, the sample is desalted via ultrafiltration and dried in a SpeedVac.

### Example 8

### Synthesis of a 3′5′-PEGylated Oligonucleotide

### 3′-PEGylation on Support (FIG. 9)

### 1) Synthesis of NHS-Ester PEG 200, 300, 400, 500, 600, 700, 800, 900, 1000, 1250, 1500, 1750, 2000, 2250, 2500, 2750, 3000, 3250, 3500, 3750, 4000, 4250, 4500, 4750, 5000, 10000, 20000, 50000 or 1000000:

[0253] The NHS-ester PEG 200, 300, 400, 500, 600, 700, 800, 900, 1000, 1250, 1500, 1750, 2000, 2250, 2500, 2750, 3000, 3250, 3500, 3750, 4000, 4250, 4500, 4750, 5000, 10000, 20000, 50000 or 1000000 is producable according to any method known in the art.

### 2) Synthesis of 3′-PEG 200, 300, 400, 500, 600, 700, 800, 900, 1000, 1250, 1500, 1750, 2000, 2250, 2500, 2750, 3000, 3250, 3500, 3750, 4000, 4250, 4500, 4750, 5000, 10000, 20000, 50000 or 1000000-Oligonucleotide Conjugates:

[0254] A further method to modify the oligonucleotide on the 3′- and the 5′-terminus is the use of 3′-amino-modifier C7 CPG of Glen Research. This modifier is a bifunctional support for oligonucleotide synthesis comprising a trityl group, for example DMT, in 5′-direction and a Fmoc protected amino group in 3′-direction. Both functional groups are connected via a C6-linker, which is finally connected to the CPG support via a succinate bridge. The Fmoc protected amino group is modified, i.e., connected to NHS-ester PEG 200, 300, 400, 500, 600, 700, 800, 900, 1000, 1250, 1500, 1750, 2000, 2250, 2500, 2750, 3000, 3250, 3500, 3750, 4000, 4250, 4500, 4750, 5000, 10000, 20000, 50000 or 1000000 before the synthesis of the oligonucleotide. The Fmoc protection group is removed from the 3′-terminus of the C7 CPG support of Glen by incubating C7 CPG for 2×10 min and 2×15 min with 3 ml 20% piperidin in DMF. Afterwards the sample is washed 6× with 3 ml DMF and 3× with 3 ml ACN. Once Fmoc is removed, the support is dried under Ar, and a 15× to 30× excess of NHS-ester PEG 200, 300, 400, 500, 600, 700, 800, 900, 1000, 1250, 1500, 1750, 2000, 2250, 2500, 2750, 3000, 3250, 3500, 3750, 4000, 4250, 4500, 4750, 5000, 10000, 20000, 50000 or 1000000 in dry DMF is added to the support. Diisopropylethylamine (10 μl; DIEA) is added to the sample. The sample is incubated for 2 h at 37° C. on a shaker (200 rpm). After the incubation the sample is washed 3× with 1 ml DMF, 3× with 1 ml ACN, and 3× with 1 ml DCM; finally the sample is dried at room temperature. To avoid negative effects on the oligonucleotide synthesis, potentially remaining free 3′-amino groups are capped by incubation of the support for 5 min at room temperature with “capping reagents” (for example acetic acid anhydride) of the oligonucleotide synthesizer. In the following the support is washed 3× with 1 ml ACN and finally dried at room temperature. Afterwards the oligonucleotide is synthesized including a 5′-aminolinker in a final cycle according to standard protocols for base coupling of thioates, wherein the trityl group (DMT) of the support is kept. The 3′-PEG 200, 300, 400, 500, 600, 700, 800, 900, 1000, 1250, 1500, 1750, 2000, 2250, 2500, 2750, 3000, 3250, 3500, 3750, 4000, 4250, 4500, 4750, 5000, 10000, 20000, 50000 or 1000000 conjugated oligonucleotide is cleaved from the support by incubation in 200 μl conc. ammoniac for 20 h at 55° C. Finally, the sample is dried in a SpeedVac to remove the ammoniac. The pellet is resolved in 50 μl 0.1 M TEAA pH 7.5 and purified via reverse-phase HPLC to remove incomplete oligonucleotide fragments (column: Amberchrom CG-300S, buffer A: 0.1 M TEAA pH 7.5, buffer B: acetonitrile). Finally, the DMT protection group is removed from the 5′-terminus of the oligonucleotide by incubating the sample with 200 μl 80% acetic acid for 2 h at room temperature. The acetic acid and the removed DMT group are separated from the sample via a NAP column. The sample is dried in the SpeedVac and dissolved again in 200 μl water. The sample is purified via a Phenomenex PolymerX RP1 column 100 Å 10×250 mm (buffer A: 0.1 M TEAA pH 7.5, buffer B: acetonitrile). Finally the sample is concentrated by ultrafiltration (MWCO=1000 Da; pressure of 4 bar Ar), and is dried in a SpeedVac.

### 3) 5′-PEGylation of the 3′-PEGylated Oligonucleotide:

[0255] The 3′-PEGylated oligonucleotide is in a next step connected to NHS-ester PEG 200, 300, 400, 500, 600, 700, 800, 900, 1000, 1250, 1500, 1750, 2000, 2250, 2500, 2750, 3000, 3250, 3500, 3750, 4000, 4250, 4500, 4750, 5000, 10000, 20000, 50000 or 1000000.

[0256] The product of step 2) is resolved in 150 μl reaction buffer (60% 0.3 M NaHCO₃ pH 8.5/40% DMF), 30× excess of NHS-ester PEG 200, 300, 400, 500, 600, 700, 800, 900, 1000, 1250, 1500, 1750, 2000, 2250, 2500, 2750, 3000, 3250, 3500, 3750, 4000, 4250, 4500, 4750, 5000, 10000, 20000, 50000 or 1000000 is added, and the sample is incubated for 2 h at 37° C. on a shaker (200 rpm). Afterwards the sample is dried in a SpeedVac and resolved in 200 μl water. The sample is then purified via a Phenomenex Jupiter 5μ C18 column 300 Å 4.6×250 mm (buffer A: 0.1 M NaHCO₃ pH 8.5, buffer B: acetonitrile). The sample is desalted and concentrated by ultrafiltration (MWCO 1000 Da; pressure of 4 bar Ar) and dried again in a SpeedVac.

### Example 9

### Synthesis of a 3′5′-PEGylated Oligonucleotide on a Modified Support with PEG-Amidite

### 1) Synthesis of 3′-PEG 200, 300, 400, 500, 600, 700, 800, 900, 1000, 1250, 1500, 1750, 2000, 2250, 2500, 2750, 3000, 3250, 3500, 3750, 4000, 4250, 4500, 4750, 5000, 10000, 20000, 50000 or 1000000-Oligonucleotide Conjugates:

[0257] The 3′-terminus of the oligonucleotide is modified according to the method described in Example 5 and 8, respectively.

### 2) 5′-PEGylation of the 3′-PEGylated Oligonucleotide:

[0258] Once the 3′-PEGylated oligonucleotide is synthesized. PEG 200, 300, 400, 500, 600, 700, 800, 900, 1000, 1250, 1500, 1750, 2000, 2250, 2500, 2750, 3000, 3250, 3500, 3750, 4000, 4250, 4500, 4750, 5000, 10000, 20000, 50000 or 1000000-amidite is used in the final coupling cycle according to method of Example 3.

### Example 10

### Synthesis of a 3′5′-PEGylated Oligonucleotide

### 5′-PEGylation on Support (FIG. 10)

### 1) Oligonucleotide Synthesis:

[0259] The oligonucleotide is synthesized on a PT 3′-aminomodifier C6 CPG or 3′-aminomodifier C7 CPG, for example of Glen, or Amino On CPG, for example of Proligo (which all comprise an amino linker; cf. Example 5). The synthesis protocol is the standard base coupling protocol for thioates. In the last cycle of the synthesis the coupling protocol is extended for coupling a 5′-aminomodifier to the 5′-terminus of the oligonucleotide; such 5′-aminomodifier (linker) is for example DMS (O)MT-aminomodifier C6 or 5′-MMT-aminomodifier C5. After the oligonucleotide synthesis including the coupling of the 5′-aminomodifier, the trityl groups are removed by 30 cycles 3% TFA in DMF in the synthesizer.

### 2) Synthesis of 5′-PEG 200, 300, 400, 500, 600, 700, 800, 900, 1000, 1250, 1500, 1750, 2000, 2250, 2500, 2750, 3000, 3250, 3500, 3750, 4000, 4250, 4500, 4750, 5000, 10000, 20000, 50000 or 1000000-Oligonucleotide Conjugates:

[0260] The detritylated sample is dried and 110 nmol of PEG 200, 300, 400, 500, 600, 700, 800, 900, 1000, 1250, 1500, 1750, 2000, 2250, 2500, 2750, 3000, 3250, 3500, 3750, 4000, 4250, 4500, 4750, 5000, 10000, 20000, 50000 or 1000000-NHS in 30 μl DMF or ACN+1.5 μl DIEA is added. The sample is incubated for 4 h at 37° C. Afterwards the sample is washed 2× with 100 μl DMF and 2× with 100 μl ACN and dried. Then the 5′-PEGylated oligonucleotide is cleaved from the support by incubation of the sample with 200 μl conc. ammoniac for 17 h at 40° C. In the following the ammoniac is removed in the SpeedVac and the PEGylated oligonucleotide is dissolved in 200 μl water. Finally, the oligonucleotide is purified on a reverse phase HPLC (Amberchrom CG-300S, buffer A: 0.1 M TEAA pH 7.5, buffer B: acetonitrile).

### 3) 3′-PEGylation of the 5′-PEGylated Oligonucleotide:

[0261] 150 to 350 nmol of PEG 200, 300, 400, 500, 600, 700, 800, 900, 1000, 1250, 1500, 1750, 2000, 2250, 2500, 2750, 3000, 3250, 3500, 3750, 4000, 4250, 4500, 4750, 5000, 10000, 20000, 50000 or 1000000-NHS, 30 to 50 μl DMF or ACN, and 1.5 to 2.5 μl DIEA are added to 5-35 nmol 5′-PEGylated oligonucleotide having a 3′-terminal amino linker (PT 3′-aminomodifier C6,3′-aminomodifier C7, or Amino On CPG), and the mixture is incubated for 1 h at 37° C. Finally, the conjugate is purified via reverse phase HPLC (Phenomenex Jupiter 5μ C18 column 300 Å 4.6×250 mm, buffer A: 0.1 M TEAA pH 7.5, buffer B: acetonitrile). Optionally, the conjugate is further purified via IE-FPLC in NaHCO₃ buffer and NaHCO₃+NaCl buffer. Finally, the conjugate is desalted via ultrafiltration (MWCO=1000 Da; pressure of 4 bar Ar), and dried in a SpeedVac.

### Analysis:

[0262] MALDI-TOF: Matrix: 3-hydroxypicolinic acid, reflector-Mode, molecular weight was determined.

### Example 11

### Synthesis of a 5′3″-PEGylated Oligonucleotide via 5′-Phosphoramidites (FIG. 11)

### 1) Oligonucleotide Synthesis:

[0263] The oligonucleotide synthesized according to this Example comprises PEG 1500, -2000, -5000, -20000 or -50000 on the 5′-terminal end and PEG 200, -400, -600, or -800 on the 3′-terminal end. The oligonucleotide is synthesized using specific 5′-phosphoric acid ester amides, where the position of the DMT protection group and the position of the phosphoric acid ester amide is opposite to the phosphoric acid ester amide used in general oligonucleotide synthesis methods. The general direction of oligonucleotide synthesis in a synthesizer is 3′ to 5′; 5′-phosphoramidites result in a direction of synthesis from 5′ to 3′, so that the 5′-terminal end is connected to the support. The oligonucleotide is synthesized in form of phosphorothioate. In a final step an aminomodifier (aminolinker) is linked to the 3′-terminal end of the oligonucleotide (cf. reaction conditions of Examples 5 and 10). Once the oligonucleotide is synthesized and the aminomodifier is linked (inverse linker), the sample is detritylated with 3% trichloro acetic acid in dichlor methan to remove the MMT- or DMS (O)MT-group from the 3′-terminal end. Finally, the oligonucleotide connected to the support is dried.

### 2) Synthesis of 3′-PEG 200, -400, -600, or -800-Oligonucleotide Conjugates:

[0264] 70 μmol PEG 200, -400, -600, or -800-NHS are added to 14 μmol of the dried sample in 560 μl dry DMF. DIEA is used as support base, wherein 0.1 μl DIEA are added per μl oligonucleotide-PEG-mixture. The sample is incubated for 90 min at 37° C. on a shaker (100 rpm). Afterwards the sample is washed 5× with 1 ml acetonitrile to remove free PEG-NHS. The 3′-PEGylated oligonucleotide is cleaved from the support by incubation with 1 ml conc. Ammoniac for about 10 h at 55° C. In the following the sample is dried in a SpeedVac to remove the ammoniac and resolved in 50 μl water. The sample is purified via a reverse phase HPLC (Phenomenex Jupiter 5μ C18 column 300 A4.6×250 mm, buffer A: 0.1 M TEAA pH 7.5, buffer B: acetonitrile).

### 3) 5′-PEGylation of the 3′-PEGylated Oligonucleotide:

[0265] The purified 3′-PEGylated oligonucleotide is incubated with a 10× molar excess of PEG 1500, -2000, -5000, -20000 or -50000 in a reaction buffer comprising or consisting of DMF/0.3 M NaHCO₃, pH 8.5 (40:60). This mixture is incubated for 1 h at 37° C. on a shaker (200 rpm). Afterwards the sample is purified via a a reverse phase HPLC (Phenomenex Jupiter 5μ C18 column 300 Å 4.6×250 mm, buffer A: 0.1 M TEAA pH 7.5, buffer B: acetonitrile). In the following the volume of the sample is reduced in a SpeedVac, and the sample is washed with 200 μl water. Finally the sample is further purified via IE-FPLC (Toyopearl SuperQ-650M 150×16 mm, buffer A: 0.01 M NaHCO₃, pH 8.5, buffer B: 0.01 M NaHCO₃, pH 8.5+2 M NaCl). The sample is desalted via ultrafiltration (MWCO=1000 Da; pressure of 4 bar Ar), and dried in a SpeedVac.

### Analysis:

[0266] MALDI-TOF: Matrix: 3-hydroxypicolinic acid, reflector-Mode, molecular weight was determined.

### Example 12

### Synthesis of Oligonucleotide-PEG Conjugate in Single Reactor Unit

[0267] The oligonucleotide was synthesized by standard phosphoramidite chemistry on 1000 Å-CPG support using a Expedite Synthesizer (PerSeptive Biosystems). The 5′-OH of the oligonucleotide was aminomodified by a 2-[2-(4-monomethoxytrityl)aminoethoxy]ethyl-(2-cyanoethyl)-N,N-diisopropyl)-phosphoramidite (5′-amino-modifier 5, Glen Research, 0.067M in acetonitrile) on the Synthesizer. The product was cleaved from the support and deprotected by using 32% NH₃ at 40° C. for 17 h. The crude product was dried and purified by reversed-phase HPLC (Phenomenex, Polymerx, 10 μm, RP-1, 100 Å, 250×10 mm; 0.1M triethylammonium acetate pH 7.5/acetonitrile). The oligonucleotide was detritylated by using 80% acetic acid at room temperature for 1 h and eluted over a NAP-10-column (Amersham Biosciences).

[0268] The 5′-aminomodified oligonucleotide was dissolved in 0.3M NaHCO₃, pH 8.5, 40% DMF and heated to 37° C. The MPEG-SPA-5K (NEKTAR, 24 equivalents) was added stepwise. After 18 h the mixture was dried and the crude product was separated from the excess of PEG by ion-exchange chromatography (TOSOHAAS, Toyopearl, Super Q-650S, 250×4 mm; 0.01M triethylammonium acetate pH 7.5/0.01M triethylammonium acetate pH 7.5, 2 M NaCl). Subsequently, sodium chloride was removed by using Amicon Ultra Centrifugal Filter Devices (Millipore). The unreacted oligonucleotide was removed by reversed-phase HPLC (Phenomenex, Polymerx, 10 μm, RP-1, 100 Å, 250×10 mm; 0.1M triethylammonium acetate pH 7.5/acetonitrile). The purified product was desalted by using a NAP 10 column (Amersham Biosciences) and lyophilized.

### Analysis:

[0269] MALDI-TOF: Matrix: 3-hydroxypicolinic acid, reflector mode. Peak at approximately 11.5 kg/mol.

### Example 13

### Cell Culture Experiments

### Suppression of TGF-Beta2 Secretion

### Cell Culture:

[0270] The human glioblastoma cell line A-172 (Accession no. CRL-1620) was established from a 53-year old man with a glioblastoma. These cells were grown in monolayers. The A-172 tumor cells were cultivated in DMEM medium with 4.5 g/l glucose and 10% (v/v) FCS at 37° C., 5% CO₂, and 95% relative humidity. To investigate TGF-beta2 suppression as well as tumor cell proliferation, 10⁴ A-172 cells/well were seeded into 12-well tissue culture plates. 24 hours after seeding the supernatants were removed and replaced by a treatment solution consisting of cell culture medium containing the respective amount of oligonucleotide with linkers with at least one polymer. The exchange of the medium was repeated after 3 days (schedule signed as 2*3 days). Medium of the negative control (=untreated cells) and the medium control (=medium without cells) were changed without addition of oligonucleotide. After 6 days of treatment the supernatants were collected for quantification of secreted TGF-beta2 by using an Enzyme-Linked Immunosorbent Assay (ELISA) from R&D Systems. In parallel, the number of tumor cells was investigated by cell counting using an electronic cell counter.

### Methods:

[0271] TGF-beta2 in cell culture supernatants was quantified by using the Quantikine® Human TGF-beta2 Immunoassay according to the manufacturer's instructions (R&D Systems). The supernatants were cleared of cellular components by centrifugation (850 g, 5 min). Optical density (OD) quantification and calculations were performed with the Multiskan Ascent Type 354, 200-240V plate reader using a 4 parameter logistic.

[0272] Tumor cell proliferation was investigated by cell counting using the Coulter Counter Z2 from Beckmann. This method is based on the principle that particles (cells resuspended in an electrolyte) passing through an electric field alter the electrical resistance. The cell number was analyzed according to the manufacturer's instructions. Briefly, the cell suspension (i.e. trypsinized tumor cells) was mixed with the counter solution (Isotone II®) in a defined volume (9.5 ml counter solution Isotone II® and 500 μl sample, dilution factor 20) and counted for three times in the Coulter Counter Z2.

### Example 14

### Enzymatic Stability Testing of Oligonucleotides

### 3′-Exonuclease Digestion

[0273] Oligonucleotides (1 OD) were dissolved in 98 μl 0.05 M Tris-HCl buffer, pH 8.5. Two μl (0.083 U) phosphodiesterase I (from Crotalus adamanteus venom, 42 U/mg, 1 mg/ml, dissolved in 110 mM Tris-HCl, 110 mM NaCl, 15 mM MgCl₂, 50% glycerol, pH 8.9) was added. The mixtures were incubated at 37° C. (Thermocycler, Hybaid, PCR Sprint).

[0274] The unmodified phosphodiester oligonucleotide was analysed at 0 min, 5 min, 10 min, 20 min, 30 min, 1 h, 3 h, 6 h, and 24 h. Unmodified thiophosphate oligonucleotide, 3′-PEGylated thiophosphate, 5′-PEGylated thiophosphate, and 3′-5′-PEGylated thiophosphate oligonucleotide were analyzed at 0 min, 10 min, 30 min, 1 h, 3 h, 6 h, 24 h, 48 h, and 72 h.

[0275] For analysis, a 10 μl aliquot was drawn, heated to 95° C. for 10 min to destroy the phosphodiesterase, and centrifuged (5 min, 16060 g, room temperature). Nine μl of the 10 μl aliquot were taken, diluted with 11 μl 0.04 M KH₂PO₄, 0.002% H₃PO₄, pH 3.6, and analyzed by HPLC using a Waters 600 Pump, Waters 600 Controller, and Waters 2487 Dual-Absorbance Detector (254 nm). Separation was performed with a Merck LiChrospher 100 Reversed-Phase C18 column (endcapped, pore size: 100 Å, particle size: 5 μm, 125×4 mm) with a flow-rate of 1 ml/min in a gradient of 0, 13.5 and 50% acetonitrile/100 and 86.5, 50% 0.04 M KH₂PO₄, 0.002% H₃PO₄, pH 3.6, respectively.

### 5′-Exonuclease Digestion

[0276] Oligonucleotides (1 OD) were dissolved in 50 μl 0.2 M triethylammonium acetate buffer, pH 6.5. Fifty μl (0.22 U) phosphodiesterase II (Type I-SA, from bovine spleen, dissolved in water (4.4 U/ml)) were added. The mixtures were incubated at 37° C. (Thermocycler, Hybaid, PCR Sprint). The unmodified phosphodiester oligonucleotide was analysed at 0 min, 5 min, 10 min, 20 min, 30 min, 1 h, 3 h, 6 h, and 24 h. Unmodified thiophosphate oligonucleotide, 3′-PEGylated thiophosphate, 5′-PEGylated thiophosphate, and 3′-5′-PEGylated thiophosphate oligonucleotide were analyzed at 0 min, 10 min, 30 min, 1 h, 3 h, 6 h, 24 h, 48 h, and 72 h.

[0277] For analysis, a 10 μl aliquot was drawn, heated to 95° C. for 10 min to destroy the phosphodiesterase, and centrifuged (5 min, 16060 g, room temperature). Nine μl of the 10 μl aliquot were taken, diluted with 11 μl 0.04 M KH2PO4, 0.002% H3PO4, pH 3.6, and analyzed by HPLC using a Waters 600 Pump, Waters 600 Controller, Waters 2487 Dual-Absorbance Detector (254 nm). Separation was performed with a Merck LiChrospher 100 Reversed-Phase C18 column (endcapped, pore size: 100 Å, particle size: 5 μm, 125×4 mm) with a flow-rate of 1 ml/min in a gradient of 0, 13.5 and 50% acetonitrile/100, 86.5 and 50% 0.04 M KH2PO4, 0.002% H₃PO₄, pH 3.6, respectively.

### Results:

[0278] Surprisingly the immunostimulators linked with at least one polymer showed increased nuclease stability over those not linked with polymers. Oligonucleotides linked with polymers at the 3′- and 5′-end were surprisingly superior over those linked with a polymer of the same size/weight as the two polymers linked at only the 3′-end or the 5′-end of the oligonucleotide.

### Example 15

### Oligonucleotide Sequences

[0279] The TGF-beta1, TGF-beta2 and TGF-beta3 oligonucleotides of this example linked with at least one polymer are also part of the invention. There are further embodiments for polymer-oligonucleotide conjugates inhibiting formation of TGF-beta 1, 2 and/or 3 “in vitro” and “in vivo” and at least one of these conjugates and compounds, respectively, or a pharmaceutical composition comprising at least one of such conjugate or compound is suitable for controlling, preventing, and/or treating of unwanted neoplasms, fibrosis or viral diseases or disorders such as HIV as described in this invention.

### TGF-beta1, -2 and -3 Antisense Oligonucleotides:

gtgccatcaatacctgcaaa, catcagttacatcgaaggag, tcttgggacacgcagcaagg,
gaaatcaatgtaaagtggac, catgaactggtccatatcga, gaggttctaaatcttgggac,
gcactctggcttttgggttc, tagctcaatccgttgttcag, ccctagatccctcttgaaat,
accaaggctctcttatgttt, tcgagtgtgctgcaggtaga, tgaacagcatcagttacatc,
gctgggttggagatgttaaa, agaggttctaaatcttggga, cgccggttggtctgttgtga,
ctgctttcaccaaattggaa, aagtatagatcaaggagagt, tgctcaggatctgcccgcgg,
gtgctgttgtagatggaaat, agggcggcatgtctattttg, taagcttattttaaatccca,
tagctgcatttgcaagactt, tctgttgtgactcaagtctg, aagcaataggccgcatccaa,
tcaatgtaaagtggacgtag, attttagctgcatttgcaag, tgtagatggaaatcacctcc,
ttaacactgatgaaccaagg, attgtaccctttgggttcgt, agatccctcttgaaatcaat,
tgtaaagtggacgtaggcag, ccattcgccttctgctcttg, tgttaaatctttggacttga,
gaagggcggcatgtctattt, gaccctgctgtgctgagtgt, gaactagtaccgccttttca,
cgatcctcttgcgcatgaac, ccggccaaaagggaagagat, aaagagacgagtggctatta,
aagtggaaatattaatacgg, agatcaaggagagttgtttg, agttgtttttaaaagtcaga,
tgtaacaactgggcagacag, ggtgttgtaacaactgggca, tacccacagagcacctggga,
gggatggcatcaaggtaccc, tcgtcatcatcattatcatc, aagggtgcctattgcatagc,
ctcactgttaactctaagag, gcaaagtatttggtctccac, caagttccttaagccatcca,
ttatcttaatgcagactttc, cttacaagaagcttccttag, actggtgagcttcagcttgc,
acttgagaatctgatatagc, aggttcctgtctttatggtg, gtgtatccatttccacccta,
cagcacagaagttggcattg, gcaaggagaagcagatgctt, agcaaggagaagcagatgct,
ttttccaagaattttagctg, ttcttgttacaagcatcatc, ttaaagaaggagcggttcgg,
ctgggctgaaatttatatat, gggcagacagctaggagttt, gtgtactcaccaaggtaccc,
cccagcactttgggaggccg, ggctcacgcctgtaatccca, tgaccgtgaactcactattt,
atagtggtgatggctataca, ttttggttacctgcaaatct, gaacactcaccctgctgtgc,
gaatggctctttaaacccta, gaagaaatggagttcagtgt, tttctcctggaagggagagg,
aaatgcaacgcgttcccaac, aatacgaaacttttgcaaag, actagtaattctcagagcgg,
aagaaactagtaattctcag, agtgcatgtttttaaaagga, cagtagtgcatgtttttaaa,
ctcagcacacagtagtgcat, agatgcaggagcaaaaaggt, caggtagacagactgagcgc,
gcctcgatcctcttgcgcat, gcggatggcctcgatcctct, ctcaggatctgcccgcggat,
gctccggatagtcttccggg, agatggaaatcacctccggg, gttgtagatggaaatcacct,
ctggtactgttgtagatgga, aggcggctgecctccggctt, aacctccttggcgtagtact,
attttataaacctccttggc, cggcatgtcgattttataaa, cgggatggcattttcggagg,
gtagggtctgtagaaagtgg, tgaagtagggtctgtagaaa, attctgaagtagggtctgta,
aagcggacgattctgaagta, cccaggttcctgtctttgtg, ggcagtgtaaacttatttta,
ccatcaatacctgcaaatct, aggtgccatcaatacctgca, agttttctgatcaccactgg,
ttatagttttctgatcacca, cctagtggactttatagttt, acattagcaggagatgtggg,
agggcaacaacattagcagg, actccagtctgtaggagggc, tcctgcacatttctaaagca,
cagcaattatcctgcacatt, atgtaaagagggcgaaggca, ctcttaaaatcaatgtaaag,
ccaagatccctcttaaaatc, cctttgggttcatggatcca, gcattgtaccctttgggttc,
gcacagaagttagcattgta, ctgaggactttggtgtgttg, tcctgggacacacagcaagg,
tttagctgcatttacaagac, caaggactttagctgcattt, gtcattgtcaccgtgatttt,
ccagttttaacaaacagaac, agatgccagttttaacaaac, gttcattatatagtaacaca,
atgaaaggttcattatatag, ttccaagggtaatgaaaggt, cttaagccatccatgagttt,
cctggcttatttgagttcaa, ttagtcctataacaactcac, gcaaagaaccatttacaatt,
cttgcttaaactggcaaaga, acatgtaaagtagttactgt, acacattacatgtaaagtag,
taagatctacacattacatg, attcaaaggtactggccagc, tttgtagtgcaagtcaaaat,
catgtcattaaatggacaat, cctacatttgtgcgaacttc, ttccccctttgaaaaactca,
tttttaatcagcctgcaaag, actgggcagacagtttcgga, taacaactgggcagacagtt,
tgttgtaacaactgggcaga, cacagagcacctgggactgt, gtacccacagagcacctggg,
tcaaggtacccacagagcac, tggcatcaaggtacccacag, ggcgggatggcatcaaggta,
tttgcaggtattgatggcac, ctccttcgatgtaactgatg, ccttgctgcgtgtcccaaga,
tcgatatggaccagttcatg, gtcccaagatttagaacctc, gaacccaaaagccagagtgc,
atttcaagagggatctaggg, aaacataagagagccttggt, tctacctgcagcacactcga,
tcacaacagaccaaccggcg, ttccaatttggtgaaagcag, actctccttgatctatactt,
ccgcgggcagatcctgagca, caaaatagacatgccgccct, tgggatttaaaataagctta,
cagacttgagtcacaacaga, ttggatgcggcctattgctt, ctacgtccactttacattga,
ggaggtgatttccatctaca, ccttggttcatcagtgttaa, acgaacccaaagggtacaat,
attgatttcaagagggatct, ctgcctacgtccactttaca, caagagcagaaggcgaatgg,
tcaagtccaaagatttaaca, aaatagacatgccgcccttc, acactcagcacagcagggtc,
tgaaaaggcggtactagttc, gttcatgcgcaagaggatcg, atctcttcccttttggccgg,
taatagccactcgtctcttt, ccgtattaatatttccactt, caaacaactctccttgatct,
ctgtctgcccagttgttaca, tgcccagttgttacaacacc, tcccaggtgctctgtgggta,
gatgataatgatgatgacga, gctatgcaataggcaccctt, ctcttagagttaacagtgag,
gtggagaccaaatactttgc, gaaagtctgcattaagataa, ctaaggaagcttcttgtaag,
gcaagctgaagctcaccagt, tagggtggaaatggatacac, caatgccaacttctgtgctg,
aagcatctgcttctccttgc, cagctaaaattcttggaaaa, gatgatgcttgtaacaagaa,
aaactcctagctgtctgccc, gggtaccttggtgagtacac, cggcctcccaaagtgctggg,
tgggattacaggcgtgagcc, tgtatagccatcaccactat, acactgaactccatttcttc,
cctctcccttccaggagaaa, gttgggaacgcgttgcattt, ccgctctgagaattactagt,
ctgagaattactagtttctt, tttaaaaacatgcactactg, atgcactactgtgtgctgag,
gcgctcagtctgtctacctg, atgcgcaagaggatcgaggc, agaggatcgaggccatccgc,
atccgcgggcagatcctgag, cccggaagactatccggagc, cccggaggtgatttccatct,
aggtgatttccatctacaac, tccatctacaacagtaccag, aagccggagggcagccgcct,
agtactacgccaaggaggtt, gccaaggaggtttataaaat, tttataaaatcgacatgccg,
cctccgaaaatgccatcccg, ccactttctacagaccctac, tttctacagaccctacttca,
tacagaccctacttcagaat, tacttcagaatcgtccgctt, cacaaagacaggaacctggg,
taaaataagtttacactgcc, tgcaggtattgatggcacct, ccagtggtgatcagaaaact,
tggtgatcagaaaactataa, cctgctaatgttgttgccct, gccctcctacagactggagt,
tgctttagaaatgtgcagga, tgccttcgccctctttacat, gattttaagagggatcttgg,
tggatccatgaacccaaagg, gaacccaaagggtacaatgc, tacaatgctaacttctgtgc,
ccttgctgtgtgtcccagga, gtcttgtaaatgcagctaaa, aaatgcagctaaagtccttg,
aaaatcacggtgacaatgac, gttctgtttgttaaaactgg, gtttgttaaaactggcatct,
tgtgttactatataatgaac, acctttcattacccttggaa, aaactcatggatggcttaag,
aattgtaaatggttctttgc, tctttgccagtttaagcaag, acagtaactactttacatgt,
ctactttacatgtaatgtgt, catgtaatgtgtagatctta, gctggccagtacctttgaat,
ctttgcaggctgattaaaaa, aactgtctgcccagttgtta, tctgcccagttgttacaaca,
acagtcccaggtgctctgtg, cccaggtgctctgtgggtac, gtgctctgtgggtaccttga,
ctgtgggtaccttgatgcca, taccttgatgccatcccgcc, ttccaccattagcacgcggg,
ccgtgaccagatgcaggatc

### Example 16

### Further Oligonucleotide Sequences

[0281] The oligonucleotides of this example linked with at least one polymer are further embodiments for polymer-oligonucleotide conjugates and compounds, respectively, or pharmaceutical compositions comprising or consisting of at least one of these conjugates or compounds in pharmaceutical acceptable carriers suitable for controlling, preventing and/or treating of unwanted neoplasms, fibrosis or viral diseases or disorders such as HIV.

cccggagggcggcatggggga, cctcagggagaagggcgc, gtaggagggcctcgaggg,
ctgcaggggctgggggtc, agggctggtgtggtgggg, ggcatgggggaggcggcg,
ccggagggcggcatgggg, ggggggctggcgagccgc, ggacaggatctggccgcggatgg,
ccccctggctcggggggc, gggccgggcggcacctcc, gggcagcgggccgggcgg,
acggcctcgggcagcggg, gggtgctgttgtacaggg, gggtttccaccattagcacgcggg,
tcatagatttcgtt, ttgtcatagattt, aagaacatatatatg, aagaacatatatat,
ttgaagaacatatata, ccgggagagcaacacggg, acttttaacttga, attgttgctgtattt,
attgttgctgtatt, aattgttgctgtatt, aattgttgctgtat,
ggcgagtcgctgggtgccagcagccgg, ggcgagtcgctggg, acatcaaaagataa,
tgacatcaaaagat, gggccctctccagcgggg, gggctcggcggtgccggg, ggggcagggcccgaggca,
ggctccaaatgtaggggc, cgggttatgctggttgtacagggc, cggcgccgccgaggcgcccggg,
ggggcggggcgggacc, gggcggggcggggcgggg, gggcggggtggggccggg,
gggcaaggcagcgggggcgggg, cggtagcagcagcg, ccagtagccacagc, gcaggtggatagtcc,
cttgcaggtggatag, cgatagtcttgcagg, ccatgtcgatagtcttgc, ctcgatgcgcttccg,
cctcgatgcgcttcc, ggatggcctcgatgc, ggacaggatctggcc, cgcagcttggacagg,
gagccgcagcttgg, cgagccgcagcttg, acctccccctggct, ccaccattagcacg,
gaacttgtcatagatttc, gctgtgtgtactctgc, gctccacgtgctgc, gaattgttgctgtatttc,
gccaggaattgttgc, gtgacatcaaaagataac, ggctcaaccactgcc, gctgtcacaggagc,
cctgctgtcacagg, gcagtgtgttatccctgc, gcagtgtgttatccc, ccaggtcacctcgg,
gccatgaatggtggc, gccatgaatggtgg, ccatgagaagcagg, ggaagtcaatgtacagc,
ccacgtagtacacgatgg, gcacttgcaggagc, ccatggcagtgacc, ggctcctccatggc,
gctaggatctgactgc, cctgactcagaggg, ggtctgaaaatgtttcc, ccattgcttgggacgg,
gcatcaaatcatcc, ccattgttcaatatcg, ggtcttcagtgaacc, ggagcttcatctggacc,
cctctggcattctgg, agggacagaagatg, gttttctgggaagg, ggttttctgggaag,
aggttttctgggaag, gtaggttttctggg, ggtaggttttctgg, ccagaatgcaagaagcc,
gctgtcccagaatgc, gcaagtcacagacttggc, ccacagctgcacagg, ggtgtggaatcaacc,
gtcatgtgctgtga, cgctatctgagcagcg, ccagtgtgatgatgg, ccagtagattaccactgg,
ggcacaaacacgcacc, ccacggatctgaagg, cggaacatctcgaagcg, cctcattcagctctcgg,
ccttgagttccaagg, cctttttggacttcagg, ggaggtagactgaccc, aaaatgtttcct,
tgaaaatgtttc, ctgaaaatgttt, tctgaaaatgttt, tctgaaaatgtt, aaatcatccatt,
ttgttcaatatc, attgttcaatatc, attgttcaatat, cattgttcaatat, cattgttcaata,
aaaagtgtttct, acatgagttttttat, aacatgagttttttat, acatgagtttttta,
aacatgagtttttta, aacatgagtttttt, aaaacatcttgtt, cagagggggctcgacgc,
ctgactcagagggggctc, agggggacagaacg, ttgggacggcaagggggacagaa,
tgggacggcaaggggga, gccacggggggagca, gcaggggccacggggggag, aggggccacggggg,
caggggccacgggg, ggtgcaggggccacg, tggtgcaggggccgccgg, ggggctggtgcaggggcc,
agggggctggtgcagggg, gggctggtgcaggg, gagggggctggtgcag, aggagggggctggtg,
gggccaggagggggctgg, aggggccaggagggggct, ggggccaggagggg, caggggccaggaggg,
tctgggaagggacaga, tgagggcaggggagta, ttgagggcaggggag, cgggtgccgggcgggggtg,
cggacgcgggtgccgggcgggggt, cgggtgccgggcggg, ggacgcgggtgccgggcg,
tgggggcagcgcctcaca, ggtgggggcagcgcct, ccattttagtgcacatccgg,
ccattttagtgcacatcc, gctgttccattttagtgc, gtagtcgtgtagag, gtttgtagtcgtgtag,
gtttcaggagtttgtag, ccagctccgaagagg, cgtcgtcgtgatcacg, ggtaaaagtactgtcc,
ggctttgacaaagcc, cttgtgcagatcgtccag, cgtggttcatcttgtgc, cacgtggttcatcttgtg,
cctccttgaaggtgg, cgctccactttgatgcg, ccttgtcctccagg, ggtactcgacagcc,
ctgacgtgggtcatg, ccgttgctgacgtgg, catcctccgcctcc, gtttccatcctccg,
ggtgtttccatcctcc, ggtgtttccatcctc, gctcagcgcctcatc, ccttcttcatcatgctgc,
ccttcttcatcatgctg, ccttcttcatcatgc, gcgtccttcttcatcatgc, cctgctcactcagg,
cgcaggcttgagcg, gccagcttcagcagc, ggtggtgaccagcc, cctcggcgaactcc,
gcttgtgtaaatcc, ggttctgcttgtgtaaatcc, gctgctcaggttcgc, gaaggcgaccgtcg,
cgaaggcgaccgtc, gcaccgtctgtggc, cgtgtccatgtcgatgg, cgtgtccatgtcgatg,
gcgtgtccatgtcg, ccagcttgcgcttgc, cgctccagcttgcg, cgtgttctgactcttgag,
cgtgttctgactcttg, gctgttgacgtggc, cgactcagtacgcc, gccatgcccgactc,
cccttggaggtggc, ttttagtgcacat, tgttccattttagt, aaaaaaagtggaag,
tacaaaaaaaagtg, atacaaaaaaaagt, catacaaaaaaaagt, catacaaaaaaaag,
gaaaaaaaacatac, cagaaaaaaaacatac, cagaaaaaaaacat, ttcaatatgaatcg,
tattcaatatgaatcg, tattcaatatgaatc, tattcaatatgaat, tatattcaatatgaa,
ttatattcaatatga, tattatattcaatatga, ttatattcaatatg, tattatattcaatatg,
attatattcaatat, tattatattcaatat, atatattatattcaatat, aaatatattatattcaatat,
tattatattcaata, atatattatattcaata, caaatatattatattcaata, tatattatattcaat,
aatatattatattcaat, tatattatattcaa, caaatatattatattcaa, caaatatattatattca,
caaatatattatattc, cacaaatatattatattc, aaatatattatatt, caaatatattatatt,
caaatatattatat, cacaaatatattatat, cacaaatatattat, tacacaaatatattat,
tacacaaatatatta, taaatacacaaatatatt, aatacacaaatata, gttaaatacacaaata,
tgttaaatacacaa, tttagagactaagt, ataaactctttaga, taaaataaactctttag,
taaaataaactcttta, ttaaaataaactcttt, cttaaaataaactc, taaaaagaacaaaca,
taaaaagaacaaac, caataaaaagaacaa, tcaataaaaagaacaa, tcaataaaaagaac,
ttcaataaaaagaa, tagattcaataaaaaga, tggcgcgggcgggtagc, gggctggcgcgggcgggtag,
tcgggggctggcgcgggcggg, tgggtgcctggtcgcgcgttctcggg, agggtccctgcggggccg,
gggagggtccctgcgggg, gggagggtccctgcgg, tgggccgggtccgc, tcccgggggtgtag,
agtactgtcccgggggtgt, gggacacgttggggggtg, gccgggggccccccggtagc,
cgggcccagccgggggc, cgggcccagccggg, gggaggtggctccgggccgg,
agggcggcgcgtgtggga, gggtggccaccggcgaaggg, aggggcaggggacgt,
taaaggggcaggggacgt, agggggtgtccgtaaagggg, ggggacgcgaacgtgccgccg,
cggggaacaagcggcccgggg, ggccgtcgggggcg, gcggccgtcgggggc, aggggggtaggaggcggg,
gcgctgggggcgcc, ggccgtcggggggt, ggggaggccagcttc, ggccgccaccttgggg,
gcggccgccgccgggg, gggcgcggccgccgccgggg, ggggtggcggcggcgg, gggggtggcggcggc,
tggggcagcagctggcag, cggggcgcccacgacacc, cggggcgcccacgacac,
gggccgcaccctctccaagtccgggg, gcagcagtcagtgg, ccattgtctagcacgg,
ggtctccattgtctagc, ggtggtattgttcagc, gctggatcaagaccc, ccacaaaatcgtgtcc,
ccttccacaaaatcgtgtcc, ggttgttcttgtgg, cctcttggttgtgc, ccagagtctcaaacacttgg,
ggtaacctgtgatctcttcc, cctgcagtactcgg, ggcattcacatactcc, gcaaacagtgcctggc,
cgcatcgtgtacttccg, gcacgttccgagcg, ggtaccagatactcc, ccagtggagacctgg,
cctgaggacacatcagg, cctcacttggttgtgagc, ggaagatgtccttcc, gcacactgctcatggc,
gctgtcacctcttgg, cctctgctgtcacc, ccacacatcactctgg, cctcctcttcagagg,
ccttctggttcacactgg, catggtgctcactgcg, cttggttgtgagcg, ggacaggcagtcac,
gtcacctcttggttgtgc, ccagagtctcaaacac, cacatactccctgg, gaccagcacgttccg,
gttggtgtctatcagtg, ccctggtagaggtg, ctcaaacacttggagc, cacacatcactctggtgg,
gcacagacagtgcgc, catggcagcagtcag, ctgctcatggcagcag, catctggaaacttccagatg,
ctggaaacttccag, cataactccacacatcactc, caccataactccacacatc, ctggtgggtgaacc,
cggattacttgcagg, cgctaggtgtcagcg, gccatcacgtatgc, gcatacaccagttcagc,
ccatcaaatacatcgg, ccagcagaagtcagg, gcttcatgtctgtgc, ggtgagttccaggtttcc,
ccacaaaatcgtgtcctgg, cccttacacatcgg, gcagctcacagatgc, gcactggtaactgc,
cctggatattggcactgg, ccagcaaactcctgg, gcagaaatgccaggc, ccattgtgcagaattcg,
ccctgcagtactcgg, ggcattcacatactccc, ggtcaggtttcacacc, ccaggtccacacagg,
ccttgtcatccagg, ggatcccaaagacc, cctcaacactttgatgg, gctgtgtcaccagc,
ggtctaagaggcagcc, ggcaatctgcatacacc, cctgtgtacgagcc, ccatccacttgatgg,
cccacacagtcacacc, ccatcgtaaggtttgg, ccttttccagcagg, ggagaattcagacacc,
ccaagtcctcattctgg, ccatcagtctcagagg, cctttgaaggtgctgg, ggcatggcaggttcc,
cctggcatggcagg, agatgtataggtaa, attttcacattctc, aattttcacattctc,
aattttcacattct, gaattttcacattc, ggaattttcacatt, agatttctttgttg,
aagatttctttgttg, aagatttctttgtt, taagatttctttgtt, ctaagatttctttgtt,
taagatttctttgt, ctaagatttctttgt, ctaagatttctttg, tctaagatttcttt,
gtctaagatttcttt, gtctaagatttctt, ttcgtctaagattt, attttgacatggtt,
aattttgacatggtt, aattttgacatggt, taattttgacatggt, taattttgacatgg,
gtaattttgacatg, tgtaattttgacatg, tgtaattttgacat, tctgtaattttgacat,
ctgtaattttgaca, tctgtaattttgaca, tctgtaattttgac, gtctgtaattttga,
aagtctgtaattttga, agtctgtaattttg, aagtctgtaattttg, aagtctgtaatttt,
gaagtctgtaatttt, gaagtctgtaattt, atgtagacatcaat, atcatccaacattt,
aatcatccaacattt, aatcatccaacatt, accatcaaatacat, aaaaacgtctttga,
ttttgttcttagaca, ttttgttcttagac, taaacagaaaagca, actaaacagaaaag,
aaactaaacagaaaag, aactaaacagaaaa, aaactaaacagaaaa, aaactaaacagaaa,
taaaaactaaacagaaa, aaaactaaacagaa, gtaaaaactaaacagaa, aaaaactaaacaga,
taaaaactaaacaga, taaaaactaaacag, gtaaaaactaaaca, aaaaagtaaaaactaaaca,
agtaaaaactaaac, aaaaaaagtaaaaactaaac, aagtaaaaactaaa, aaaaaaagtaaaaactaaa,
aaagtaaaaactaa, aaaagtaaaaacta, aaaaaaagtaaaaacta, aaaaagtaaaaact,
aaaaaaagtaaaaact, aaaaaaagtaaaaac, caaaaaaagtaaaaac, aaaaaaagtaaaaa,
caaaaaaagtaaaa, aacaaaacaaaaaaagtaaa, aaacaaaaaaagta, caaaacaaaaaaagta,
caaaacaaaaaaagt, caaaacaaaaaaag, ctttaaaaaaacaaaac, tctttaaaaaaacaaa,
gtctttaaaaaaacaaa, gtctttaaaaaaaca, gtctttaaaaaaac, tttatttcgtcttt,
tctttatttcgtct, tatttgcaaatgga, tatatttgcaaatgg, tatatttgcaaatg,
caaaatatatttgcaaatg, caaaatatatttgcaaat, caaaatatatttgca, caaaatatatttgc,
ttccaaaatatatttg, ttttccaaaatatattt, gttttccaaaatatatt, gttttccaaaatat,
ggttaggcaaagcc, ccgagaacatcatcgtgg, ccgagaacatcatcgtg, ccgagaacatcatcg,
cgtagtctgcgttgaagc, ccatgctggagaagg, ccgtgcagaagtcc, ggaatgaagttggc,
tgaccgtgggaatg, tggcagtgaccgtg, agatggcagtgacc, cgagatggcagtgacc,
ccagccactgcagg, gcaccagccactgc, ccctggagtaagcc, ggagataactgttccacc,
ggagataactgttcc, cttctagttggtctg, catcttctagttgg, tctcatcttctagttgg,
ctgcaaagcagacttctc, ccttcagcaggttgg, cccaggtcatcagg, ccagtcagatcaagg,
ggtgaaggcctcctc, cagggtgaaggcctc, cctggatgatgctgg, ccactgtgcagagg,
ggagtacaggtgacc, gctcattgctgctgc, ggaaggctcattgctgc, ttttctcttcttct,
atcttattcctttc, catcttattccttt, tagtttttccttct, tctagtttttcctt,
aactctagtttttc, gaactctagttttt, tgaactctagttttt, atgaactctagttttt,
tgaactctagtttt, atgaactctagtttt, atgaactctagttt, gcacacagtagtgc,
gcaggatcagaaaagc, gcaggtagacaggc, gcttgctcaggatctgc, gcaagtccctggtgc,
cctggagcaagtcc, cgtagtactcttcgtcg, cgtagtactcttcg, gtaaacctccttgg,
gtctattttgtaaacctcc, gcatgtctattttgtaaacc, ggcatcaaggtaccc, ggcatcaaggtacc,
gctttcaccaaattggaagc, gagaatctgatatagctc, ggagatgttaaatctttgg,
gctgtcgatgtagc, ccaggttcctgtctttatgg, cagcagggacagtg, cttgcttctagttcttcac,
gccatcaatacctgc, ggtgccatcaatacc, ccactggtatatgtgg, ggactttatagttttctg,
ctcaagtctgtaggag, ggtctgttgtgactc, caattatcctgcacatttc, gcagcaattatcctgc,
ggcagcaattatcc, ggttcgtgtatccatttcc, gcacagaagttggc, ccagcacagaagttgg,
gtgctgagtgtctg, cctgctgtgctgagtg, gctcaggaccctgc, gcagcaaggagaagc,
ccaatgtagtagagaatgg, gctgcatttgcaag, aaaaaagaaatcaa, aaaaaaagaaatcaa,
aaaaaaaagaaatcaa, taaaaaaaagaaatcaa, ataaaaaaaagaaatcaa,
aataaaaaaaagaaatcaa, gaataaaaaaaagaaat, agaataaaaaaaagaaat, cagaataaaaaaaa,
tcagaataaaaaaa, ttgtttttaaaagt, agttgtttttaaaa, aagttgtttttaaaa,
aaagttgtttttaaaa, aaaagttgtttttaaaa, aaaaagttgtttttaaaa,
aaaaaagttgtttttaaaa, aaaaaaagttgtttttaaaa, aaaaaaaagttgtttttaaa,
tttttaaaaaagtg, ttttttaaaaaagtg, attttttaaaaaagtg, cattttttaaaaaagt,
gcattttttaaaaaa, tgcattttttaaaaaa, agcttattttaaat, aagcttattttaaat,
taagcttattttaaat, tgtaattattagat, atgtaattattagat, tgatgtaattatta,
atgatgtaattatta, atggtattatataa, tatggtattatataa, ttatggtattatataa,
tttatggtattatataa, atttatggtattatataa, aatcatattagaaa, ttacaatcatatta,
tttacaatcatatta, ggcatgacgcctttcc, gcatgacgcctttc, gcctgacgagaggc,
ctcaagcctgacgag, ccacagttcctttttc, gctgcaataaagatacag, gctgcaataaagatac,
ggacactgatttctatg, gcattatcaactttgg, acttttagcaccaatg, ccaagaaacttttagcacc,
ccagatcatcttcc, agtcaaggacacatag, tctttgagcaacatgg, gggtataacagctg,
gaggtgaaccattaatgg, tcttcgtatcgtttag, tgttggatagtgttc, gttgatcacttgctg,
ggattccattactcg, gacatatgaaaaatgttgtc, gccaataaagacatatg,
ccagaatcaagattctg, ctgttccagaatcaag, gacaaatctgttccagaatc,
ggaaagacaaatctgttcc, gattaagaggacaagc, ggaagattaagagg, gcagtgtgattattctgg,
ggagaaagatacatatctg, ggagatcttacagg, gcatttgcagtagaatttac, cagtgaaagagagg,
gctagccgatacac, ggaagatccttgtatgc, gcatgaggaagatcc, ggagtcatttttgttg,
ccaattgatactaagattc, tcttttgagcacacg, ccttcagcacttcttttg, ggttgcttccttcagc,
cagtggtttaggag, cctgagatcctcatttc, ccaaggtcctgagatcc, ggtgtacacagtgtcc,
tatctttaatttct, tcttttgaatataa, ttcttttgaatataa, tttcttttgaatataa,
ttttcttttgaatataa, tttttcttttgaatataa, atttctatgttttt, ttaaagaatttatg,
gttaaagaatttat, agttaaagaatttat, aagttaaagaatttat, taagttaaagaatttat,
tttagtaagttaaa, ttttagtaagttaaa, atttcttttagtaa, aatttcttttagtaa,
atcaatttctttta, tatcaatttctttta, aatatataagttca, aaatatataagttca,
caaatatataagtt, tcaaatatataagtt, tgtcaaatatataa, aatttatttcagta,
aataaaaatgtgat, taataaaaatgtgat, tagctaataaaaat, ttagctaataaaaat,
tttagctaataaaaat, aataaaatagtcaa, taataaaatagtcaa, ttaataaaatagtcaa,
tttaataaaatagtcaa, gtttaataaaatagt, agtttaataaaatagt, gagtttaataaaata,
agagtttaataaaata, aataattcttgtat, tatattacattcat, atctatattacatt,
ataaacatttttca, aataaacatttttca, aaataaacatttttca, gaaataaacattttt,
tgaaataaacattttt, ttgaaataaacattttt, tttgaaataaacattttt,
ttttgaaataaacattttt, tttttgaaataaacattttt, atttttgaaataaacatttt,
aatttttgaaataaacatt, aaatttttgaaataaacatt, aaaatttttgaaataaacat,
taaaatttttgaaataaaca, ataaaatttttgaaataaac, tataaaatttttgaaataaa,
gtataaaatttttgaaat, ggtataaaattttt, aggtataaaattttt, aaggtataaaattttt,
aaaggtataaaattttt, aaaaggtataaaattttt, taaaaggtataaaattttt,
ataaaaggtataaaattttt, tttagaaagatttt, aagataaatttctt, taagataaatttctt,
ttaagataaatttctt, tttaagataaatttctt, ttttaagataaatttctt,
tttttaagataaatttctt, atttttaagataaatttctt, tatttttaagataaatttct,
ttatttttaagataaatt, tttatttttaagataaatt, ctttatttttaagataaat,
tctttatttttaagataaat, atctttatttttaagataaa, atctttatttttaa,
gatctttatttttaa, agatctttatttttaa, tagatctttatttttaa, aatcatcattaatt,
aaatcatcattaatt, aaaatcatcattaatt, taaaatcatcattaatt, ttaaaatcatcattaatt,
tttaaaatcatcattaatt, atttaaaatcatcattaatt, aatttaaaatcatcattaa,
gaatttaaaatcat, tgaatttaaaatcat, ttaaaataggaaat, aatttctctttaaa,
aaatttctctttaaa, taaaattttgaatg, ctaaaattttgaat, tttgctaaaatttt,
atatgaaaaatgtt, ttttaaattaagca, ttgtaaaaatcaaa, tttgtaaaaatcaaa,
tttgataaaacttt, atgttttatcattt, aatgttttatcattt, aaatgttttatcattt,
taaatgttttatcattt, tctaaatgttttat, ttctaaatgttttat, taagatcaaataaa,
ataagatcaaataaa, aataagatcaaataaa, taataagatcaaataaa, ttaataagatcaaataaa,
tttaataagatcaaataaa, ttgtttaataagat, attgtttaataagat, tgattgtttaataa,
ttgattgtttaataa, tttgattgtttaataa, ttttataaaacagt, tttttataaaacagt,
ttttttataaaacagt, cttttttataaaaca, acttttttataaaaca, cacttttttataaaa,
acacttttttataaaa, tacacttttttataaaa, atacacttttttataaaa, attttgaatttaag,
gattttgaatttaa, tgattttgaatttaa, atgattttgaatttaa, aatgattttgaatttaa,
ataatagaatcata, tataatagaatcata, tataatagaatcat, tactataatagaat,
atactataatagaat, aatactataatagaat, agaatactataata, tagaatactataata,
atagaatactataata, tatagaatactataata, ttatagaatactataata, aatatttgttttca,
aaatatttgttttca, aaaatatttgttttca, caaaatatttgtttt, aaattttatatgga,
tgaaattttatatg, ctgaaattttatat, tctgaaattttatat, ttctgaaattttatat,
atctgatttatttt, aagatattaaatgt, tgaagatattaaat, ataaataacaatga,
tataaataacaatga, gtataaataacaat, tgtataaataacaat, ttgtataaataacaat,
tcttgtataaataa, atcttgtataaataa, aatcttgtataaataa, acaactttttaaat,
tacaactttttaaat, tacaactttttaaa, cggggggttttgggcggcatg,
ttttcggggggttttgggcggca, tcggggggttttgggcggc, ggtggcggccgtttttcggggggt,
ccgggggttccgcggcggcagcg, cgggggttccgcggcgg, ggcggcggtgccgggggttccgc,
ggagggggcggcggcggcggtg, gggggcggcggcggcgg, ggggcggcggcggcg,
agggggcctggtggaag, tagggggcctggtg, gtagggggcctggt,
gaggtattggtgacaaggtagggggc, tcttcaggggtgaaatatagatgttc, ggactcttcaggggtg,
tcggactatactgc, cagttcggactatact, aagcctaagacgca, gcccaagttcaaca,
tgaaaagtcgcggt, ggttaattaagatgcctc, tctctaagagcgca, acgtgaggttagtttg,
cacgtgaggttagt, catagaacagtccg, cagtcatagaacagtc, ctttgcagtcatagaaca,
tgcagtcatagaac, ggtcgtttccatct, catagaaggtcgtttc, cgtcatagaaggtc,
catcgtcatagaagg, ggacgggaggaacgaggcgttgag, tagccataaggtcc, ggttactgtagcca,
ggttactgtagcca, agttcttggcgcggaggt, aggtgaggaggtccgagt, tggactggattatcag,
gtggtggtgatgtgcccg, tgtcacgttcttgg, ctcatctgtcacgt, cgaagccctcggcgaacc,
gcgtgttctggctgtgcagttcgg, ctgccccgttgacc, aggtttgcgtagac, ggttgaagttgctg,
ctgggttgaagttg, tgctgcacgggcatctgctg, ggcactgtctgaggctcctccttcagg,
actccatgtcgatg, ctctccgccttgatcc, gttcctcatgcgcttc, ctgagctttcaagg,
gcgattctctccagcttcctttttcg, ctgagctttcaaggttttcactttttcctc, tccctgagcatgtt,
tctgtttaagctgtgc, ctttctgtttaagctgtg, ggttcatgactttctg, cgtggttcatgact,
actgttaacgtggttc, ccactgttaacgtg, cccactgttaacgt, agcatgagttggca,
gcgttagcatgagt, gtttgcaactgctg, caaaatgtttgcaactgc, tccattttagtgcacatc,
ctgttccattttagtgca, gtgtatgagtcgtc, ctgtgtatgagtcg, cgtagctgtgtatg,
tcgtgtagagagag, agtttgtagtcgtgtaga, gtttgtagtcgtgtag, agtttgtagtcgtg,
ggagtttgtagtcg, tcaggagtttgtagtc, gtttcaggagtttgtagt, tcggtttcaggagt,
ttgagactccggta, accagaaaagtagctg, cctgaccagaaaag, attcaggcgttcca,
ggtaaaagtactgtcc, gggtaaaagtactgtc, gcacctccaccgctgcca, ctcctgctcctcggtgac,
gctttgacaaagcc, cttgtgcagatcgt, tcatcttgtgcagatc, gttcatcttgtgcaga,
cgtggttcatcttg, tcacgtggttcatc, ggttggtgtaaacg, tacgagctcccggtcccgac,
tagctgatggtggt, tccttgaaggtgga, tcttccatgttgatgg, ctttgatgcgctct,
ctccactttgatgc, gctccagcttccgcttccggcacttggtgg,
ggccttgagcgtcttcaccttgtcctccag, tgaccttctgtttgag, catgaccttctgtttg,
gtcatgaccttctg, cgagaacatcatcg, gtagtctgcgttga, gctgcagcgggaggatgacg,
agtaagagaggctatc, gtagtaagagaggc, ggtagtaagagagg, gtgagtggtagtaaga,
gtccgtgcagaagtcctg, gaatgaagttggcact, ggaatgaagttggc, gggaatgaagttgg,
gctgcaccagccactgcaggtccggactgg, tcatggtcttcacaac,
caatgctctgcgctcggcctcctgtcatgg, ctagagttcctcac, gagtacgctagagt,
gaagagtacgctag, ctgcttcccacccagcccccacattccc, ttcatcctctgtactgggct,
gttacggatgtgca, cagttacggatgtg, ccagttacggatgt, agagtctgagttgg,
gtgagactcagagt, tcttagggtgagac, gagagtacttcttagg, ggaagaaactatgagagt,
cttagggaagaaactatg, cggtaagaaacttagg, agcatgcggtaaga, gtctgaaagcatgc,
agaacaaagaagagcc, caagagaacaaagaagag, cagcaagagaacaaag, tcctcagcaagaga,
aggtgtgacttgca, gaataggtgtgacttg, cagaataggtgtgact, gcagaataggtgtg,
cagttgcagaataggt, gaaaccatttctgacc, tgtgaaaccatttctgac, cactgtgaaaccatttct,
ccactgtgaaacca, agaactggctcctgcagcttccctgcttcc, cacctccattcaccc,
cagtaaaagtgtctgc, cgacattcagtaaaagtg, gaccgacattcagt, cttctggagataactaga,
catcttattcctttccct, cagccatcttattcct, tgcagccatcttattc, gagtgtatcagtcag,
ggagtgtatcagtc, cttggagtgtatcagt, acagagtacctacc, ccaactttcccttaag,
ccttatgctcaatctc, gtcttactcaaggg, acagtcttactcaagg, cataagacacagtcttac,
gaaagcataagacacagt, ggaaagcataagacac, agggataaaggaaagc, cctgtatacagagg,
tgtctcctgtatacag, catcttctagttggtc, ctcatcttctagttgg, cttctcatcttctagttg,
caaagcagacttctca, ctgcaaagcagact, ctagtttttccttctcct, tctagtttttccttctcc,
caggatgaactctagt, tcgtagaaggtcgt, agggttactgtagc, gtagtggtgatgtg,
cgtcgtagaaggtc, tttcgtgcacatcc, agtttgtagtcgtgaaga, cgagaacatcatgg,
gtagtaggaaaggc, ggtagtaggaaagg, ggaatggtagtagg, ggtcattgagaagag,
gctaatgttcttgacc, gccaaggtcctcat, ggagtctatctcca, ccaaagaatcctgact,
cacatgcttagtgg, ctcgtaaatgaccg, aggaatctcgtaaatgac, cagcagcgattcat,
ggagatcatcaaagga, ctcagcaatggtca, gatctcgaacacct, cacaatctcgatctttct,
ccttcttaaagattggct, cacataccaactgg, agcttgatgtgagg, gaagttgtagcttgatgt,
gcttgaagttgtagct, ctgcttgaagttgtag, gacacaactcctct, tcctttgatagacacaac,
ctcgtttgatagacac, ggttagcacacact, ggtaacggttagca, cgtaacacatttagaagc,
ctcatccgtaacac, ccggtaagtattgtagtt, ggtgtatttccttgac, acataccaactggtgt,
gtccctatacgaac, ttcatgtctgtgcc, gtaggtgagttcca, gttgtgagcgatga,
catagttgtcctcaaaga, ggcatagttgtcct, cattgtctagcacg, ctccattgtctagc,
gtattgttcagcgg, tcaagatctctgtgag, cacaaaatcgtgtcct, tccttccacaaaatcg,
gtggaagatgtcct, tcttgtggaagatgtc, tctatcagtgtgagag, ggttggtgtctatc,
acatcggagaacag, ccttacacatcgga, acaatcctcagaactc, gctctgacaatcct,
tggttgaagtggag, ctgtggttgaagtg, gttgtaggtgacca, ctgtgttgtaggtg,
gactcaaacgtgtc, catggactcaaacg, cgaatgtataccgg, ccgaatgtataccg,
gccgaatgtatacc, gtagttgtagggac, tagaaaggtagttgtagg, gtagaaaggtagttgtag,
cgtagaaaggtagttg, ccgtagaaaggtag, gaccatagcacact, ggatattggcactg,
cctggatattggca, gctcccaaagatct, cccatcaaagctct, caaacacttggagc,
gtctcaaacacttgga, gagtctcaaacacttg, gtaacctgtgatctct, ggtaacctgtgatc,
gtataggtaacctgtg, tgagatgtataggtaacc, tgctgagatgtatagg, ccatgctgagatgt,
ggattacttgcagg, tgttatggtggatgag, ggtgttatggtgga, gcagttgacacact,
agtactcggcattc, cattcacatactccct, tccaaaacaggtcact, ggtccttatagtgg,
cagaatgccaacca, acgagaatgccaac, gatcccaaagacca, tcgcttgatgagga,
catcgtgtacttcc, gcatcgtgtacttc, actgtgccaaaagc, cttgtagactgtgc,
cccttgtagactgt, tcaacactttgatggc, ccctcaacactttg, gtgttttccctcaaca,
gtatgcttcgtctaag, cgtatgcttcgtct, ccatcacgtatgct, gcataagctgtgtc,
catggtctaagagg, caatctgcatacacca, ggcaatctgcatac, ctgtctcgtcaatg,
cataactccacacatc, agtcacaccataactc, acagtcacaccataac, ccccaaaagtcatc,
tcgtaaggtttggc, gatcccatcgtaag, caatggtgcagatg, gacatcaatggtgc,
gtagacatcaatggtg, catgatcatgtagacatc, ccatgatcatgtagac, catttgaccatgatcatg,
ccaacatttgaccatg, tcatccaacatttgacca, gagtcaatcatccaacat, cagagtcaatcatcca,
ccgacattcagagt, gaattcagacaccaac, gatgaccacaaagc, ccatcaaatacatcgg,
tcaccatcaaatacatcg, caacgtagccatca, acgtctttgacgac, caaaaacgtctttgacga,
ggcaaaaacgtctttg, caaaggcaaaaacgtc, gtgtcaagtactcg, gtaatagaggttgtcg,
cccagtaatagagg, catggtgctcactg, gtgcctgtacgtac, tgcaggtggatagt,
catgtcgatagtcttgca, gtcgatagtcttgc, ccatgtcgatagtc, ctccatgtcgatag,
cttggacaggatct, tgctgttgtacagg, gtgctgttgtacag, ttggcgtagtagtc,
tccaccattagcac, gatttcgttgtggg, gtcatagatttcgttgtg, tgtactctgcttgaac,
gtgtactctgcttg, tgctgtgtgtactc, ctgatgtgttgaagaaca, ctctgatgtgttgaag,
gctctgatgtgttg, gagctctgatgtgt, cacttttaacttgagcct, ctccacttttaacttgag,
tgctgtatttctggtaca, ccaggaattgttgc, ttgctgaggtatcg, gataaccactctgg,
caaaagataaccactctg, cggtgacatcaaaag, cctcaatttcccct, gttatccctgctgt,
gcagtgtgttatcc, gatgtccacttgca, tagtgaacccgttg, tgccatgaatggtg,
gttcatgccatgaatg, catgagaagcagga, gctttgcagatgct, gagctttgcagatg,
tagttggtgtccag, ctgaagcaatagttgg, agctgaagcaatagttgg, ggagctgaagcaat,
caatgtacagctgc, ggaagtcaatgtacag, cggaagtcaatgtac, gcggaagtcaatgt,
agttggcatggtag, gcagaagttggcat, ctccaaatgtaggg, accttgctgtactg,
tgctggttgtacag, ggttatgctggttg, gtagtacacgatgg, cgtagtacacgatg,
cacgtagtacacga, catgttggacagct, gcacgatcatgttg, cacacagtagtgca,
gatcagaaaagcgc, accgtgaccagatg, gtagacaggctgag, tatcgagtgtgctg,
ttgcgcatgaactg, ttgctcaggatctg, actggtgagcttca, gctcaggatagtct,
tgtagatggaaatcacct, tggtgctgttgtag, ttctcctggagcaa, tactcttcgtcgct,
cttggcgtagtact, cggcatgtctattttgta, cgggatggcatttt, ctgtagaaagtggg,
acaattctgaagtagggt, attgctgagacgtcaaat, tctccattgctgag, tcaccaaattggaagcat,
ctctgaactctgct, aacgaaagactctgaact, tgggttctgcaaac, ctggcttttgggtt,
gttgttcaggcact, tctgatatagctcaatcc, tctttggacttgagaatc, tgggttggagatgt,
tgctgtcgatgtag, acaactttgctgtcga, attcgccttctgct, gaaggagagccatt,
tcagttacatcgaagg, tgaagccattcatgaaca, tcctgtctttatggtg, aaatcccaggttcc,
ggacagtgtaagcttatt, gtacaaaagtgcagca, tagatggtacaaaagtgc,
cacttttatttgggatgatg, gcaaatcttgcttctagt, gtgccatcaatacc, ggtatatgtggagg,
tctgatcaccactg, tcctagtggactttatag, tttttcctagtggact, caataacattagcagg,
aagtctgtaggagg, tctgttgtgactcaag, gttggtctgttgtg, caaagcacgcttct,
tttctaaagcaataggcc, gcaattatcctgcaca, acgtaggcagcaat, atcaatgtaaagtggacg,
ctagatccctcttg, ccatttccacccta, tgggttcgtgtatc, tggcattgtaccct,
tccagcacagaagt, ataaatacgggcatgc, agtgtctgaactcc, tgtgctgagtgtct,
ataagctcaggacc, aggagaagcagatg, agcaaggagaagca, aatcttgggacacg,
tagagaatggttagaggt, gttttgccaatgtagtag, cttgggtgttttgc, gcaagactttacaatc,
gcatttgcaagactttac, tttagctgcatttgcaag, gccacttttccaag, ttggtcttgccact,
cagcacacagtagt, cgatagtcttgcag, ctttcaccaaattggaag, caccaaattggaagc,
tcaccaaattggaagc, ctctggcttttggg, cggcatgtctattttg, cactacagacgagc,
cgtgcactacagacg, ggaacagttcgtcc, gaacagttcgtccatg, ccagagtttcggttc,
ctaggactgggacag, cgcacttgtagcg, ctcgcacttgtagc, gcacttgtagc,
gcgcactgtccctg, ccagggagatgcgc, gccggtgaggagg, ccggtgaggaggg,
cggttcactcggc, gagtttcggttcactc, ggcacgattgtcaaag, caggcgtcaccccc,
gcaggcgtcaccc, ctccctcctaagc, ccctcctaagcgg, cgagtccgcgttcg,
catcttctgccattc, gtgttttcccaccag, ggttttggttcactag, gcatcttcacgtctcc,
cttcacgtctcctgtc, gtcaccgcgtagtc, caaataggcaaggtc, cttgcaaataggcaag,
tgcttgcaaatagg, ctgcttgcaaatagg, gcaggtggatattt, ctgctgttggcag,
cactagtttccaagt, gttttggttcactag, ctttgatttcaggatag, gcacttcttctttatct,
ccaagtcagatttcc, gtttccaagtcagatttc, ggttcactagtttcc, ggttttggttcactag,
ccgaaaaattgggca, ccgaaaaattggg, ctatccgaaaaattgg, gttgataatgtcatcag,
ctcatgttgataatgtc, ctgtcaccgcgtag, cgtctcctgtcaccg, cttcacgtctcctg,
gagaactttatcatgtc, gctatatgcaggg, ccagctgctatatgcagg, aggctaaattttgcct,
ggctaaattttgcc, ggctaaattttgccttc, gcaggctaaattttgcc, gagttacccaagcg,
cagagttacccaagcg, cagagttacccaag, acagagttacccaag, ggtgcaaaacagag,
ctaggtgcaaaacag, gagaactttatcatgtcc, gctagatgaatggc, gcaaacatggcaggc,
cagcaaacatggca, gcagcaaacatggc, agcagcaaacatgg, cagcagcaaacatg,
agcagcagcaaaca, cagcagcagcaaaca, cagcagcagcaaac, caccagcagcagca,
gcattgacgtcagc, gatgttgtcgtgctc, tgagatgttgtcgtgct, tgagatgttgtcgtg,
gccaatgagatgttg, ctgccaatgagatg, cacatgggcatcac, tgtccacatgggca,
gtactgtccacatg, cagctgctatatgc, gttctccaccaggg, agttctccaccagg,
caaagttctccaccag, ccaagagtcatccagg, cccaagagtcatcc, cctgcattttcccaag,
tcctgcattttccc, gccatatctagaggc, tcacatcttcagcc, gcttcacatcttcagc,
cagcttcacatcttc, gtaacttatacagctgc, ccagtttttgtctgg, ccatttgtctcagg,
gtgtagcccatttg, gcttcggtgtagcc, gatcacttcaattgcttc, cttgtggaggcagg,
gctgccttgtggag, ctatttgctgccttgtgg, ggatgtctccacgc, ggaaggatgtctcc,
tgcggaaggatgtc, gtttgcggaaggatgtc, gctgagtttgcgga, ggtaaagctgagtttg,
tcggtaaagctgag, gactcggtaaagctg, agagactcggtaaagc, gaaattgtcagcaggc,
gaaattgtcagcagg, ggaaattgtcagcagg, ggaaattgtcagcag, gggaaattgtcagc,
gtgtgggaaattgtc, ggtttacacggtgtg, gctttggtttacacg, gcacctttgggatgc,
ccaggttctgcttcc, gctctgtctagtggc, actctccatgtctc, caactctccatgtctc,
caactctccatgtc, agcaactctccatg, gtagcaactctccatg, gtagcaactctcca,
ggttgtagcaactctcc, cgggcagtcctcca, gcaccgggcagtc, aggcaccgggcag,
gtgtgttaccaggtc, tgtgtgttaccaggt, tgggtcactgtgtg, cagactgtgggcatg,
cccaccagactgtggg, ccaccagactgtgg, tgcccaccagactg, cggcttcctcccc,
ccttgtcttccacc, accgaggctgccac, ggaagaaaccgagg, gggaagaaaccgag,
ggccatctgcgcc, gcggccatctgcg, gtggcggccatctg, accgtggcggccat,
gccgctcaatcttcatc, cttcatcttgtgatagg, gctcaatcttcatcttg, cagaaacactgttacag,
cagttgcagaaacactg, gtttcagttgcagaaac, cttccaccagaggg, gtcttccaccagag,
cttgtcttccaccagag, tccttgtcttccac, cttccttgtcttccac, catcttgtgataggg,
gctaggtgcagtggt, gatggctaggtgca, gtggatgatggctag, cccgtggatgatgg,
ctgcccgtggatga, agagcctccaccca, gttgtactctcgagc, cgttgtactctcg,
cgcgttgtactctc, gagtctccatgccg, ctgagtctccatgc, catggctgagtctc,
tgcatggctgagtc, gcgttcacgttggc, gtgcgagcgttcac, aggtgcgagcgttc,
gcaaaggtgcgagc, cctggtggctcagg, gtcagtcacctgag, caggtcagtcacctg,
cagcaggtcagtcac, gcagcaggtcagtc, catttagcagcaaggtc, gcagcatttagcagc,
ctgagcagcatttag, cccatgagaatcct, ccttcccatgagaatcc, tcctccccttccca,
gcctccagtagacc, gtcagacagggcct, ccatgtcagacagg, ggcccatgtcagac,
gctattcctgaaatcac, cctcttgtcttcttacc, ggagaagaaacctcttg, ccttgctgaagtttctt,
ccaagactccttgc, ccctttcatggagc, cctcttggtgtgac, gactaaggatgccg,
gtggcaggactaagg, agacgtggcaggac, cttccagcaggcag, gttcctctgcctgg,
gatgttcctctgcctg, gagatgttcctctgcc, gtgagatgttcctctg, cagagagtgagatgttcc,
ccagagagtgagatgttc, ggtccagagagtgag, gaggtccagagagtg, ggtcctgtagtgcc,
gattttatgatgcagge, gacctgcatcccttattg, tagttgattttccagcag,
gaatctcacgttttgc, cagagaaagaatctcacg, tttcaccatcagagaaag,
catttggacatttcacc, ccttcatttggacatttc, caatgtgcttgatgatcc, cgcatcggatttctc,
caaaccgcatcggatttc, gaactgcaaaccgc, gcagagaagaactgc, gcaagtaaacatggg,
ggtccacgttttgg, gcaagggtccacgttt, tggcttcttcttcaggg, tcctgctggcttcttc,
gtcctgctggcttc, ggtagtctaggaattgg, cttgcaggtagtctagg, gaaactcttgcaggtag,
caccaagaaactcttgc, cattacaccaagaaactc, ctcggtgttcattacacc,
ctttctattatccactcg, ccagtttagtctcaactt, aaccagtttagtctcaac,
acaaaccagtttagtctc, ctcgcgaaaaagtttctt, ccctcgcgaaaaagtttc,
gtccctcgcgaaaaag, cagttgaaccgtccc, gctttcgaagtttcagtt, gatgctttcgaagtttc,
ctgtctctgcaaataatg, cacttattacattcaccc, ttttcctccagttcctc,
ggacaatatgtacaaaactc, gttgatgaacatttggac, gtgttgatgaacatttgg,
caaaatttggccaggg, gcccaaaatttggcc, cccagcccaaaatttgg, gtccccagcccaaaatt,
aaatcgccagaggctg, accaaatcgccagagg, catcaccaaatcgccag, taggagtggttgaggc,
gtgtaggagtggttgag, ctgtgtaggagtgg, cccacatgcctgtg, cgatgaacaacgag,
ctggcgatgaacaacg, cgctggcgatgaac, gagctagtcccgttg, gcgaagagctagtcc,
ccagttatgcgaagagc, ccccagttatgcgaag, cacatgcttggcgc, gatcacatgcttggcg,
gacaaagagcatgatcac, gagtcacagggacaaag, gagagtcacagggac, gcagagagtcacagg,
ccatgcagagagtc, ccaccatgcagagag, tagccacgaccacc, gattagctgcccatcctt,
ggtatagattagctgcc, gtatcttctgtgaatggg, ctggcccacagtct, ctctggcccacagt,
tgcagggctctctg, agtgcagggctctc, cactgatcatgatggc, gacactgatcatgatggc,
acaatgacactgatcatg, gaaccaccaggaggat, gacacaaaacagccact, gtggacctttcggac,
caaccagcatacgaagt, tccctctgggcttc, actgtccctctggg, gactgtccctctgg,
cctagatgactgtccc, cagcgaggatactgc, cttcaccagcgaggat, tttcctctgggtcttcac,
ctttcctctgggtcttc, ctcccaatccaagtttt, ttcatcccggagcc, ttcttcatcccggagc,
gctcagccagttcttc, gacagagagggcac, cttcacctccgacag, gaaaagtctgggcagg,
gaccctggaacagaaaag, ctgaccctggaacag, actacaggctgaccct, attcactacaggctgacc,
cgattcactacagg, ggccgattcactac, cgaacgtctgttggtc, cgcgaacgtctgttg,
cttctgtttgtcgaggat, ttcaccaccttctgtttg, aggatgcgcttttcattc,
agcttgcaggatgcg, gttgacagcttgcaggat, ggaacggaaagttgacag,
aactcgagtttgacgagg, tgtccttgaaggagaac, cgtactccatgaccatgt,
gcacgtactccatgac, gattctccggcttcag, tcaatgagcagattctcc, ggtcaatgagcagattc,
ccctgctggtcaatg, tagccctgctggtc, cgcttggcgaaacc, ccttcacgcgcttg,
aaggtccaagtgcg, tgccgcacaaggtc, ggtgaggaccaccattt, gggtgtcacaggtg,
ataccatcttcttcaggg, ggtgataccatcttcttc, ccaggtgataccatcttc,
cctcactgctctggt, taagacctcactgc, cagagcctaagacctc, ccagagcctaagacc,
tcttcctttttgtgaagc, gaccaaattccatcttcc, atcagtggaccaaattcc,
ggttctttctggtccttt, tttttgggttctttctgg, ggtcttatttttgggttc,
aatgggcagactctcct, tccaccatgacctcaatg, aacggcatccaccatg, gtgaacggcatccac,
acttgagcttgtgaacgg, ttcatacttgagcttgtg, ctggtgtagttttcatac,
agctgctggtgtagtttt, aggaggaccagggt, aggtggtccaggag, tttctggccaaactgagg,
ggaggtttctggcc, tctggagtggccac, cttctggagcatgttgct, gccttctggagcatg,
gtttgtctggccttctg, gagtttgtctggccttct, ctagagtttgtctggcct,
gcaagggtaaaattctag, agtgcaagggtaaaattc, aaacaggcctccact,
cttggttaattccaatgg, aggcaactcccattagtt, tactactaaggcacaggg,
aatactactaaggcacag, gtacatcttcaagtcttc, ggagtggacatgat, aagaagatgaagcctttg,
ccgtcttactcttcttgg, ccgatacaattccaagg, ccttttccttctgag, ctgttgcaagtacg,
cagaagcagagggc, cctcagaagcagagg, ctcctcagaagcag, acaggctggtggca,
ccactctcaaacaggc, acggtagccgaagc, gacggtagccgaagc, ggccagacggtagc,
gtgtagggccagacggta, ccgaagccatttttcagg, ccccgaagccatttttc, ggttgatgtcgtcc,
gcttgagacactcgc, ccggacccgtccat, gcttgctttactgc, ggttgctctgagac,
gccacagtcatgcc, cgggcatgctggcg, gtgaagttcaggatgatc, ccagtgcctcatgg,
cagtgttctccatgg, ctgtaccagaccgag, gcatactgtttcagc, gccatcagctccttg,
ccacaccatagatgg, gctggagcagtttcc, ctcgcttctgctgc, accgtggcaaagcg,
aggtgacaccgtgg, gacttgattccttcag, ggatttgacttgattcc, gctgctgttcatgg,
ccgtttctttcagtagg, cttgaagtaggagc, cgctcctacatggc, gatgaggtacaggcc,
gtagatgaggtacag, gagtagatgaggtac, cctgggagtagatg, ggacctgggagtag,
acatgggtggaggg, gtgctcatggtgtc, ctttcagtgctcatg, tgctttcagtgctca,
gatgatctgactgcc, gttcgagaagatgatc, gggttcgagaagatg, ggtttgctacaacatg,
cagcttgagggtttg, tgcccctcagcttg, gacacacactatctc, gcagccatctttattc,
gttcagcagccatc, tggttcagcagcca, ctactggttcagcagc, tctactggttcagc,
gccacaaagttgatgc, cattgccacaaagttg, gagaacttggtcattc, ggtcaatgaagagaac,
cgatttccttggtc, ccgatttccttggtc, caaatagaggccgatttc, caaatagaggccga,
cctctaggctggct, catacctctaggctg, agccatacctctag, cagccatacctctag,
cacagagatagttacag, gtcttcgttttgaacag, ctagtcttcgttttgaac,
tagctagtcttcgttttg, gagccactgcgcc, cgtgagccactgcg, cgtaacgatcactgg,
gcactcgtaacgatc, ggagcactcgtaac, catcatcctgaggt, cagtatcatcatcctg,
ctcagtatcatcatcc, ctaaaagtatgtgccatc, cacatcgcctctct, gcttcacagtcacatcgc,
ggaaggcttcacagtc, cctgtgacttgagaattg, ggaagacctgtgac, ctctgctccacatatttg,
caacgaagatctctg, caacaccaacgaag, ggtcttctgtttgc, cgatgaagtggtaggaag,
ggttgcatggaagc, ggtcacaaacttgcc, ctgatttggtccactag, catgttagcactgttc,
ggtcttgatgtactcc, ccacctaaagagagatc, cttgtactgcaccatc, gccagttaagaagatg,
gagatcatgatccatgg, gtagtgtcccaatagtg, cttcctcatcattccc, cacaagcttttcgac

### Example 17

### TGF-Beta Protein

[0282] Presented are the amino acid sequences of TGF-beta1, TGF-beta2 and TGF-beta 3 with the international one letter abbreviation for amino acids.

RXXR: cleavage site of the mature (active) part (XX may be anything)
ASPC: the C of this motif is the C for the intermolecular cystine bridge that links the two monomers into a functional dimer
C C C: intramolecular cysteine bridges (cysteine knot motif) mature protein of TGF-beta 1, 2 and 3 contains 112 amino acids from the end of this listing

```
TGF-beta 1
MPPSGLRLLLLLLPLLWLLVLTPGRPAAGLSTCKTIDMELVKRKRIEAIRGQILSKLRLASPPSQGEVPPGPLPE
AVLALYNSTRDRVAGESAEPEPEPEADYYAKEVTRVLMVETHNEIYDKFKQSTHSIYMFFNTSELREAVPEPVLL
SRAELRLLRLKLKVEQHVELYQKYSNNSWRYLSNRLLAPSDSPEWLSFDVTGVVRQWLSRGGEIEGFRLSAHCSC
DSRDNTLQVDINGFTTGRRGDLATIHGMNRPFLLLMATPLERAQHLQSSRHRRALDTNYCFSSTEKNCCVRQLYI
DFRKDLGWKWIHEPKGYHANFCLGPCPYIWSLDTQYSKVLALYNQHNPGASAAPCCVPQALEPLPIVYYVGRKPK
VEQLSNMIVRSCKCS
preferred amino acid sequences of TGF-beta1:
  1) ALDTNYCFSSTEKNCCVRQL
  2) YIDFRKDLGWKWIHEPKGYH
  3) ANFCLGPCPYIWSLDTQYSK
  4) VLALYNQHNPGASAAPCCVP
  5) QALEPLPIVYYVGRKPKVEQ
  6) LSNMIVRSCKCS
  7) TEKNCCVRQLYIDFRKDLGW
  8) KWIHEPKGYHANFCLGPCPY
  9) WSLDTQYSKVLALYNQHNP
10) GASAAPCCVPQALEPLPIVY
11) YVGRKPKVEQLSNMIVRSCKCS
12) QYSKVLALYNQHNPGASAAPCCVPQALEPLPIVYYVGRKP
13) QYSKVLALYNQHNPGASAAPCCVPQALEPLPIVYYVGRKP
                                                I
        QYSKVLALYNQHNPGASAAPCCVPQALEPLPIVYYVGRKP
        (dimer of the TGF-beta1 amino acid sequence No. 12 coupled by an S-S
        bridge at the Cytosins of the AAPC motif)
14) ALDTNYCFSSTEKNCCVRQLYIDFRKDLGWKWIHEPKGYHANFCLGPCPYIWSLDTQYSKVLALYNQHNPGA
SAAPCCVPQALEPLPIVYYVGRKPKVEQLSNMIVRSCKCS
15) ALDTNYCFSSTEKNCCVRQLYIDFRKDLGW
16) KWIHEPKGYHANFCLGPCPYIWSLDTQYSK
17) VLALYNQHNPGASAAPCCVPQALEPLPIVY
18) YVGRKPKVEQLSNMIVRSCKCS
19) CVRQLYIDFRKDLGWKWIHEPKGYHANFCL
20) GPCPYIWSLDTQYSKVLALYNQHNPGASAA
21) PCCVPQALEPLPIVYYVGRKPKVEQLSNMI
TGF-beta 2
MHYCVLSAFLILHLVTVALSLSTCSTLDMDQFMRKRIEAIRGQILSKLKLTSPPEDYPEPEEVPPEVISIYNSTR
DLLQEKASRRAAACERERSDEEYYAKEVYKIDMPPFFPSENAIPPTFYRPYFRIVRFDVSAMEKNASNLVKAEFR
VFRLQNPKARVPEQRIELYQILKSKDLTSPTQRYIDSKVVKTRAEGEWLSFDVTDAVHEWLHHKDRNLGFKISLH
CPCCTFVPSNNYIIPNKSEELEARFAGIDGTSTYTSGDQKTIKSTRKKNSGKTPHLLLMLLPSYRLESQQTNRRK
RALDAAYCFRNVQDNCCLRPLYIDFKRDLGWKWIHEPKGYNANFCAGACPYLWSSDTQHSRVLSLYNTINPEASA
SPCCVSQDLEPLTILYYIGKTPKIEQLSNMIVKSCKCS
Preferred amino acid sequences of TGF-beta2
  1) ALDAAYCFRNVQDNCCLRPL
  2) YIDFKRDLGWKWIHEPKGYN
  3) ANFCAGACPYLWSSDTQHSR
  4) VLSLYNTINPEASASPCCVS
  5) QDLEPLTILYYIGKTPKIEQ
  6) LSNMIVKSCKCS
  7) VQDNCCLRPLYIDFKRDLGW
  8) KWIHEPKGYNANFCAGACPY
  9) LWSSDTQHSRVLSLYNTINP
10) EASASPCCVSQDLEPLTILY
11) YIGKTPKIEQLSNMIVKSCKCS
12) QHSRVLSLYNTINPEASASPCCVSQDLEPLTILYYIGKTPK
13) QHSRVLSLYNTINPEASASPCCVSQDLEPLTILYYIGKTPK
                                                I
        QHSRVLSLYNTINPEASASPCCVSQDLEPLTILYYIGKTPK
        (dimer of the TGF-beta2 amino acid sequence No. 12 coupled by an S-S
        bridge at the Cytosins of the ASPC motif)
14) ALDAAYCFRNVQDNCCLRPLYIDFKRDLGWKWIHEPKGYNANFCAGACPYLWSSDTQHSRVLSLYNTINPEA
SASPCCVSQDLEPLTILYYIGKTPKIEQLSNMIVKSCKCS
15) ALDAAYCFRNVQDNCCLRPLYIDFKRDLGW
16) KWIHEPKGYNANFCAGACPYLWSSDTQHSR
17) VLSLYNTINPEASASPCCVSQDLEPLTILY
18) YIGKTPKIEQLSNMIVKSCKCS
19) CLRPLYIDFKRDLGWKWIHEPKGYNANFCA
20) GACPYLWSSDTQHSRVLSLYNTINPEASAS
21) PCCVSQDLEPLTILYYIGKTPKIEQLSNMI
TGF-beta3
MKMHLQRALVVLALLNFATVSLSLSTCTTLDFGHIKKKRVEAIRGQILSKLRLTSPPEPTVMTHVPYQVLALYNS
TRELLEEMHGEREEGCTQENTESEYYAKEIHKFDMIQGLAEHNELAVCPKGITSKVFRFNVSSVEKNRTNLFRAE
FRVLRVPNPSSKRNEQRIELFQILRPDEHIAKQRYIGGKNLPTRGTAEWLSFDVTDTVREWLLRRESNLGLEISI
HCPCHTFQPNGDILENIHEVMEIKFKGVDNEDDHGRGDLGRLKKQKDHHNPHLILMMIPPHRLDNPGQGGQRKKR
ALDAAYCFRNVQDNCCLRPLYIDFKRDLGWKWIHEPKGYNANFCAGACPYLWSSDTQHSRVLSLYNTINPEASAS
PCCVSQDLEPLTILYYIGKTPKIEQLSNMIVKSCKCS
preferred amino acid sequences of TGF-beta3:
  1) ALDTNYCFRNLEENCCVRPL
  2) YIDFRQDLGWKWVHEPKGYY
  3) ANFCSGPCPYLRSADTTHST
  4) VLGLYNTLNPEASASPCCVP
  5) QDLEPLTILYYVGRTPKVEQ
  6) LSNMVVKSCKCS
  7 NLEENCCVRPLYIDFRQDLG
  8 WKWVHEPKGYYANFCSGPCP
  9) YLRSADTTHSTVLGLYNTLN
10) PEASASPCCVPQDLEPLTIL
11) YYVGRTPKVEQLSNMVVKSCKCS
12) THSTVLGLYNTLNPEASASPCCVPQDLEPLTILYYVGRTPK
13) THSTVLGLYNTLNPEASASPCCVPQDLEPLTILYYVGRTPK
                                                I
        THSTVLGLYNTLNPEASASPCCVPQDLEPLTILYYVGRTPK
        (dimer of the TGF-beta3 amino acid sequence No. 12 coupled by an S-S
        bridge at the cytosins of the ASPC motif)
14) ALDAAYCFRNVQDNCCLRPLYIDFKRDLGWKWIHEPKGYNANFCAGACPYLWSSDTQHSRVLSLYNTINPEA
        SASPCCVSQDLEPLTILYYIGKTPKIEQLSNMIVKSCKCS
15) ALDAAYCFRNVQDNCCLRPLYIDFKRDLGW
16) KWIHEPKGYNANFCAGACPYLWSSDTQHSR
17) VLSLYNTINPEASASPCCVSQDLEPLTILY
18) YIGKTPKIEQLSNMIVKSCKCS
19) CLRPLYIDFKRDLGWKWIHEPKGYNANFCA
20) GACPYLWSSDTQHSRVLSLYNTINPEASAS
21) PCCVSQDLEPLTILYYIGKTPKIEQLSNMI
```

### Example 18

### PEGylation of the N-Terminus of a Protein or a Peptide

[0283] The protein or peptide is synthesized according to Merrifield, wherein the functional groups of the side chains are protected by t-BOC, and the N-terminal and is protected by Fmoc. Fmoc is removed by incubation with 20° A) piperidine in DMF. After several washing steps the protein or peptide is incubated with PEG 400, -600, -800, -1000, -1500, -2000, -5000, -20000 or -50000-NHS ester for 24 h at 30° C. Afterwards, the protective t-BOC groups of the side chains of the amino acids are removed and the N-terminal PEGylated protein or peptide is cleaved from the support by incubation with hydrofluoric acid and purified via FPLC.

### Example 19

### PEGylation of the N- and C-Terminus of a Protein or a Peptide

[0284] The protein or peptide is synthesized according to Merrifield, wherein the functional groups of the side chains are protected by benzyloxy-carbonyl, and the N-terminal end is protected by Fmoc. After the synthesis of the protein or peptide, the protein or peptide is cleaved from the support, and purified. The C-terminal end is activated with dicyclohexylcarbodiimide (DCC) and incubated with PEG-200, 300, 400, 500, 600, 700, 800, 900, 1000, 1250, 1500, 1750, 2000, 2250, 2500, 2750, 3000, 3250, 3500, 3750, 4000, 4250, 4500 or 4750, 5000, 10000, 20000, 50000 or 1000000-amine (PEG-NH₂) for 15 h at 30° C. The C-terminal PEGylated protein or peptide is purified and the N-terminal protective group Fmoc is removed by incubation of the PEGylated protein or peptide with 20% piperidine in DMF. After several washing steps the protein or peptide is incubated with PEG 200, 300, 400, 500, 600, 700, 800, 900, 1000, 1250, 1500, 1750, 2000, 2250, 2500, 2750, 3000, 3250, 3500, 3750, 4000, 4250, 4500 or 4750, 5000, 10000, 20000, 50000 or 1000000-NHS ester for 24 h at 30° C. In the following, the C- and N-terminal PEGylated protein or peptide is purified on a FPLC and afterwards the side chains are deprotected by incubation in HBr/acetic acid. Finally, the conjugate is purified again.

### Example 20

### PEGylation of the C-Terminus and of Side Chains of a Protein or a Peptide

[0285] The protein or peptide is synthesized according to Merrifield, wherein the functional groups of the side chains are protected by an alloc protecting group, and the N-terminal end is protected by Fmoc. After the synthesis of the protein or peptide, the protein or peptide is cleaved from the support, the C-terminal end is activated and incubated with PEG-NH₂ as described in example 19. In the following the PEGylated protein or peptide is purified and the alloc protecting group of the side chains is removed by incubating the protein or peptide with tetrakis(triphenylphosphine)palladium along with a 37:2:1 mixture of chloroform, acetic acid, and N-methylmorpholine for 2 h. Afterwards the C-terminal PEGylated protein or peptide is washed with 0.5% DIPEA in DMF, 3×10 ml of 0.5% sodium diethylthiocarbamate in DMF, and then 5×10 ml of 1:1 DCM:DMF. In the following the protein or peptide is incubated with PEG 200, 300, 400, 500, 600, 700, 800, 900, 1000, 1250, 1500, 1750, 2000, 2250, 2500, 2750, 3000, 3250, 3500, 3750, 4000, 4250, 4500 or 4750, 5000, 10000, 20000, 50000 or 1000000-NHS ester for 15 h at 35° C. Finally, the conjugate is purified on a FPLC and the N-terminal end is deprotected by incubation in 20% piperidine in DMF, and is then purified again.

[0286] It must be noted that as used in this specification and the appended claims, the singular forms “a”, “an” and “the” include plural references unless the context clearly dictates otherwise. Unless defined otherwise all technical and scientific terms used herein have the same meaning as commonly understood to one of ordinary skill in the art to which this invention belongs.

### REFERENCES

[0287] Abuchowski, A. et al.; Cancer Therapy with Chemically Modified Enzymes. I. Antitumor Properties of Polyethyleneglycol-Asparaginase Conjugates, Cancer Biochem. Biophys., 7; 175-186, Gordon and Breach Science Publishers, Inc. (1984)
[0288] Braun, D., Cherdron, H., Rehahn, M., Ritter, H., Voit, B.; Polymer Synthesis: Theory and Practice, Fundamentals, Methods, Experiments, Springer New York, London, Berlin 4th ed., 2005.
[0289] Brunton, Chapter 38 In: Goodman & Gilman's The Pharmacological Basis of Therapeutics, 9th Ed., Hardman et al., eds., McGraw-Hill, New York, N.Y., pages 934-935 (1996)
[0290] Buur et al., J. Control Rel. 14, 43-51 (1990)
[0291] Carrington, L. et al.: “IL-10 antibodies to TGF-beta2 and PDGF inhibit RPE-mediated retinal concentration”, Invest. Ophthalmol. Vis. Sci., 2000, 41(5), 1210-1216.
[0292] Carrington, L M. et al.: “Differential regulation of key stages in early corneal wound healing by TGF-beta isoforms and their inhibitor”, Invest. Ophthalmol. Vis. Sci., 2006, 47(5), 1886-1894.
[0293] Chirila, T. V., Rakoczy, P. E. Garetti, K. L. Lou, S., Constable, I. J.; Review: The use of synthetic polymers for delivery of therapeutic antisense oligodeoxynucleotides. Biomaterial 23 321-342 (2001)
[0294] Chonn et al., Current Op. Biotech., 6, 698-708 (1995)
[0295] El-Hariri et al., J. Pharm. Pharmacol., 44, 651-654 (1992)
[0296] Gualtieri, F.; New Trends in Synthetic Medicinal Chemistry: Vol. 7 Methods and Principles in Medicinal Chemistry, Chapter), Chemistry of Antisense Oligonucleotides, edited by R. Mannhold, H Kuinyi, H. Timmerman, Wiley-VCH, Weinheim (Germany) New York, Toronto
[0297] Hayashi T. Tanaka H. Tanaka J. Wang R. Averbook B J, Cohen P A, Shu S., et al., Immunogenicity and therapeutic efficacy of dendritic-tumor hybrid cells generated by electrofusion, Clin Immunol. 2002 July; 104(1):14-20
[0298] Parkhurst M R, DePan C, Riley J P, Rosenberg S A, Shu S., et al., Hybrids of dendritic cells and tumor cells generated by electrofusion simultaneously present immunodominant epitopes from multiple human tumor-associated antigens in the context of MHC class I and class II molecules., J Immunol. 2003 May 15; 170(10):5317-25.
[0299] Phan V, Errington F, Cheong S C, Kottke T, Gough M, Altmann S, Brandenburger A, Emery S, Strome S, Bateman A, Bonnotte B. Melcher A, Vile R., A new genetic method to generate and isolate small, short-lived but highly potent dendritic cell-tumor cell hybrid vaccines., Nat. Med. 2003 September; 9(9):1215-9. Epub 2003 Aug. 17.
[0300] Hecht; M.; Bioorganic Chemistry: Nucleic acid, Chapter 2; The Chemical Synthesis of DNA/RNA, Oxford University Press, New York, Oxford (1996)
[0301] Hermanson, G. T.; Bioconjugate Techniques, Academic Press, New York, Boston, London (1996)
[0302] Hooftman, G. et al.,; Review Poly(ethylene glycol)s with Reactive Endgroups. U. Practical Consideration for the Preparation of Protein-PEG Conjugates, J. Bioactive Compat. Polymers, 11; 135-159, Technomic Publishing Co., Inc. (April 1996)
[0303] Jäschke, A. et al.: “Synthesis and properties of oligodeoxyribonucleotide-polyethyleneglycol conjugates”, Nuc. Acid Res., 1994, Vol. 22, No. 22, 4810-4817.
[0304] Ladd, D., Snow, R.; Reagents for the Preparation of Chromophorically Labeled Polyethylene Glycol-Protein Conjugates, Anal. Biochem., 210; 258-261, Academic Press, Inc. (1993)
[0305] Lee et al.; Critical Reviews in Therapeutic Drug Carrier Systems 8, 91-192 (1991)
[0306] Muranishi; Critical Reviews in Therapeutic Drug Carrier Systems 7, 1-33 (1990)
[0307] Nathan, A. at al. Copolymers of Lysine and Polyethyleneglycol: A New Family of Functionalized Drug Carriers, Bioconj. Chem. 4; 54-62, American Chemical Society (1993)
[0308] Nielsen, P. E. Engholm, M., Berg R. H. Buchardt, O.; Sequence-selective recognition of DNA by strand displacement with a thymine-substituted polyamide. Science 1991, 254(5037), 1497-1500 (1991)
[0309] Nielsen p. E.; Review: A DNA mimic with a peptide backbone, Bioconjug. Chem. 5(1) 3-7 (1994)
[0310] Schlingensiepen, R., Brysch, W., Schlingensiepen, K.-H.; Antisense—From Technology to Therapy, Blackwell Science, Berlin, Vienna (1997)
[0311] Takahashi et al., J. Pharm. Pharmacol., 40, 252-257 (1988)
[0312] Wojtowicz-Praga, S., Invest. New Drugs: “Reversal of tumor-induced immunosuppression by TGF-beta inhibitors”, 21(1), 21-32 (2003)
[0313] Zalipsky, S. at al., Chemistry of polyethyleneglycol conjugates with biologically active molecules, Adv. Drug Del. Reviews., 16; 157-182, Elsevier Science B. V. (1995)
[0314] Zalipsky, S. et al., Peptide Attachment to Extremities of Liposomal Surface Grafted PEG Chains: Preparation of the Long-Circulating Form of Laminin Pentapeptide, YIGSR, Bioconj. Chem., 6; 705-708, American Chemical Society (1995)
[0315] Zhao and Harris, ACS Symposium Series 680, 458-72 (1997)
[0316] Yamashita et al., J. Pharm. Pharmacol., 39, 621-626 (1987)

### Patente und Publikationen

[0317] U.S. Pat. No. 5,719,262
[0318] U.S. Pat. No. 5,714,331
[0319] U.S. Pat. No. 5,700,922
[0320] U.S. Pat. No. 5,652,356
[0321] U.S. Pat. No. 5,652,355
[0322] U.S. Pat. No. 5,623,065
[0323] U.S. Pat. No. 5,565,350
[0324] U.S. Pat. No. 5,491,133
[0325] U.S. Pat. No. 5,403,711
[0326] U.S. Pat. No. 5,366,878
[0327] U.S. Pat. No. 5,539,082
[0328] U.S. Pat. No. 5,256,775
[0329] U.S. Pat. No. 5,220,007
[0330] U.S. Pat. No. 5,149,797
[0331] U.S. Pat. No. 5,013,830
[0332] U.S. Pat. No. 3,687,808
[0333] WO 2007/109097
[0334] WO 2006/096222
[0335] WO 2005/111238
[0336] WO 2005/084712
[0337] WO 2005/059133
[0338] WO 2005/014812
[0339] WO 03/06445
[0340] WO 01/68122
[0341] WO 01/68146
[0342] WO 99/63975
[0343] WO 98/33904
[0344] WO 95/17507
[0345] WO 95/02051
[0346] WO 94/25588

1-23. (canceled)

24. A conjugate or compound comprising polyethylene glycol and an oligonucleotide, wherein at least one polyethylene glycol is linked to the 5′-end of the oligonucleotide and at least one polyethylene glycol is linked to the 3′-end of the oligonucleotide, wherein the molecular weight of the polyethylene glycol linked to the 5′- and 3′-end of the oligonucleotide is identical and is <5000 Da, or wherein the molecular weight of the polyethylene glycol linked to the 5′- and 3′-end of the oligonucleotide is different.

25. The conjugate or compound according to claim 24, wherein the polyethylene glycol linked to the 5′-end of the oligonucleotide has the 1.5- to 100-fold molecular weight of the polyethylene glycol linked to the 3′-end of the oligonucleotide, or 3′-end of the oligonucleotide the 1.5- to 100-fold molecular weight of the polyethylene glycol linked to the 5′-end of the oligonucleotide, or the polyalkylen oxide linked to the 5′-end or 3′-end of the oligonucleotide has the 1.5- to 100-fold molecular weight of the polyalkylen oxide linked a phosphate group, a sugar moiety and/or a base of the oligonucleotide, or the polyalkylen oxide linked to the phosphate group, the sugar moiety and/or any base of the oligonucleotide has the 1.5- to 100-fold molecular weight of the polyalkylen oxide linked to the 5′-end or 3′-end of the oligonucleotide.

26. The conjugate or compound according to claim 24, wherein the molecular weight of the polyethylene glycol linked to the 5′-end and the 3′-end is identical and the molecular weight of the polyethylene glycol linked to the 5′-end and the 3′-end is 200, 300, 400, 500, 600, 700, 800, 900, 1000, 1250, 1500, 1750, 2000, 2250, 2500, 2750, 3000, 3250, 3500, 3750, 4000, 4250, 4500 or 4750 Da.

27. The conjugate or compound according to claim 24, wherein the molecular weight of the polyethylene glycol linked to the 5′-end and the 3′-end is different and the molecular weight of the polyethylene glycol linked to the 5′-end is 200, 300, 400, 500, 600, 700, 800, 900, 1000, 1250, 1500, 1750, 2000, 2250, 2500, 2750, 3000, 3250, 3500, 3750, 4000, 4250, 4500, 4750, 5000, 10000, 20000, 50000 or 1000000 Da and the molecular weight of the polyethylene glycol linked to the 3′-end of the oligonucleotide is 200, 300, 400, 500, 600, 700, 800, 900, 1000, 1250, 1500, 1750, 2000, 2250, 2500, 2750, 3000, 3250, 3500, 3750, 4000, 4250, 4500, 4750, 5000, 10000, 20000, 50000 or 1000000 Da.

28. The conjugate or compound according to claim 24, wherein the oligonucleotide is an antisense oligonucleotide, an aptamer, a spiegelmer, shRNA, miRNA, RNAi and/or CpG-oligonucleotides.

29. The conjugate or compound according to claim 24, wherein the oligonucleotide hybridizes with mRNA of a molecule negatively influencing a physiological and/or biochemical effect in a cell, or hybridizes with mRNA of the receptor of the molecule.

30. The conjugate or compound according to claim 24, wherein the oligonucleotide hybridizes with mRNA of TGF-beta1, TGF-beta2, TGF-beta3, VEGF, IL-10, c-jun, c-fos, c-erbb2 (Her-2), MIA, and/or its receptor.

31. The conjugate or compound according to claim 24, wherein the oligonucleotide is SEQ ID No.: 1 (the nucleotide sequence: CGGCATGTCTATTTTGTA) and/or SEQ ID No.: 28 (the nucleotide sequence: CTGATGTGTTGAAGAACA).

32. The conjugate or compound according to claim 24 comprising more than one oligonucleotide.

33. The conjugate or compound according to claim 24 comprising at least one linker and/or spacer.

34. The conjugate or compound according to claim 24, wherein the linker is a zero length linker, a homobifunctional linker, and/or a heterobifunctional linker.

35. Method for the production of a conjugate or a compound according to claim 24, comprising the following steps
a) isolating or synthesizing the oligonucleotide,
b) protecting the 5′-end or the 3′-end of the oligonucleotide, and/or
a phosphate group, a sugar moiety, and/or a base of the oligonucleotide,
c) linking at least one polyalkylen oxide to the unprotected 3′-end or 5′-end of the oligonucleotide.

36. Method of claim 35 further comprising the steps:
d) deprotecting the protected 5′-end or 3′-end of the oligonucleotide, and/or
a phosphate group, a sugar moiety, and/or a base of the oligonucleotide,
e) linking at least one polyalkylen oxide with the deprotected 5′-end or 3′-end of the oligonucleotide, and/or the deprotected phosphate group,
sugar moiety, and/or
base of the oligonucleotide.

37. A pharmaceutical composition comprising a conjugate or compound according to claim 24 and a pharmaceutically acceptable carrier.

38. Method for the production of a pharmaceutical composition comprising adding a pharmaceutically acceptable carrier to the conjugate or compound produced according to the method of claim 35.

39. Method of controlling, preventing, or treating a disease or disorder, wherein the disease or disorder is cancer, fibrosis, or viral disease or disorder, comprising administering the conjugate or compound to a patient in need thereof.

40. The method according to claim 39, wherein the disease or disorder is a cancer selected from the group consisting of solid tumors, blood born tumors, leukemias, tumor metastasis, hemangiomas, acoustic neuromas, neurofibromas, trachomas, pyogenic granulomas, psoriasis, astrocytoma, acoustic neuroma, blastoma, Ewing's tumor, craniopharyngioma, ependymoma, medulloblastoma, glioma, hemangioblastoma, Hodgkins-lymphoma, medulloblastoma, leukaemia, mesothelioma, neuroblastoma, neurofibroma, non-Hodgkins lymphoma, pinealoma, retinoblastoma, sarcoma, seminoma, trachomas, Wilm's tumor, or is selected from the group of bile duct carcinoma, bladder carcinoma, brain tumor, breast cancer, bronchogenic carcinoma, carcinoma of the kidney, cervical cancer, choriocarcinoma, cystadenocarcinoma, embryonal carcinoma, epithelial carcinoma, esophageal cancer, cervical carcinoma, colon carcinoma, colorectal carcinoma, endometrial cancer, gallbladder cancer, gastric cancer, head cancer, liver carcinoma, lung carcinoma, medullary carcinoma, neck cancer, non-small-cell bronchogenic/lung carcinoma, ovarian cancer, pancreas carcinoma, papillary carcinoma, papillary adenocarcinoma, prostate cancer, small intestine carcinoma, prostate carcinoma, rectal cancer, renal cell carcinoma, skin cancer, small-cell bronchogenic/lung carcinoma, squamous cell carcinoma, sebaceous gland carcinoma, testicular carcinoma, and uterine cancer.

41. The method according to claim 39, wherein the disease or disorder is a viral disease or disorder selected from the group consisting of hepatitis A (HVA), hepatitis B (HVB), hepatitis C (HVC), herpes simplex virus (HSV), HIV, FIV, poliovirus, influenza virus, adenoviruses, papilloma viruses, Epstein-Barr-viruses, and small pox virus.

42. Method of using the conjugate or compound according to claim 24 comprising administering the conjugate or compound to a patient for controlling, preventing, or treating a disease or disorder, wherein the disease or disorder is cancer, fibrosis, or viral disease or disorder.

43. The method according to claim 42, wherein the disease or disorder is a cancer selected from the group consisting of solid tumors, blood born tumors, leukemias, tumor metastasis, hemangiomas, acoustic neuromas, neurofibromas, trachomas, pyogenic granulomas, psoriasis, astrocytoma, acoustic neuroma, blastoma, Ewing's tumor, craniopharyngioma, ependymoma, medulloblastoma, glioma, hemangioblastoma, Hodgkins-lymphoma, medulloblastoma, leukaemia, mesothelioma, neuroblastoma, neurofibroma, non-Hodgkins lymphoma, pinealoma, retinoblastoma, sarcoma, seminoma, trachomas, Wilm's tumor, or is selected from the group of bile duct carcinoma, bladder carcinoma, brain tumor, breast cancer, bronchogenic carcinoma, carcinoma of the kidney, cervical cancer, choriocarcinoma, cystadenocarcinoma, embryonal carcinoma, epithelial carcinoma, esophageal cancer, cervical carcinoma, colon carcinoma, colorectal carcinoma, endometrial cancer, gallbladder cancer, gastric cancer, head cancer, liver carcinoma, lung carcinoma, medullary carcinoma, neck cancer, non-small-cell bronchogenic/lung carcinoma, ovarian cancer, pancreas carcinoma, papillary carcinoma, papillary adenocarcinoma, prostate cancer, small intestine carcinoma, prostate carcinoma, rectal cancer, renal cell carcinoma, skin cancer, small-cell bronchogenic/lung carcinoma, squamous cell carcinoma, sebaceous gland carcinoma, testicular carcinoma, and uterine cancer.

44. The method according to claim 42, wherein the disease or disorder is a viral disease or disorder selected from the group consisting of hepatitis A (HVA), hepatitis B (HVB), hepatitis C (HVC), herpes simplex virus (HSV), HIV, FIV, poliovirus, influenza virus, adenoviruses, papilloma viruses, Epstein-Barr-viruses, and small pox virus.

The application's sequence listing, which the Patent Office published only in electronic form, follows.

SEQUENCE LISTING (2589 sequences)

SEQ ID NO: 1 - DNA, 18 bp, Artificial
  Synthesized antisense oligonucleotide
cggcatgtctattttgta

SEQ ID NO: 2 - DNA, 20 bp, Artificial
  Synthesized antisense oligonucleotide
gctttcaccaaattggaagc

SEQ ID NO: 3 - DNA, 14 bp, Artificial
  Synthesized antisense oligonucleotide
ctggcttttgggtt

SEQ ID NO: 4 - DNA, 14 bp, Artificial
  Synthesized antisense oligonucleotide
cacacagtagtgca

SEQ ID NO: 5 - DNA, 14 bp, Artificial
  Synthesized antisense oligonucleotide
gcacacagtagtgc

SEQ ID NO: 6 - DNA, 17 bp, Artificial
  Synthesized antisense oligonucleotide
gcttgctcaggatctgc

SEQ ID NO: 7 - DNA, 14 bp, Artificial
  Synthesized antisense oligonucleotide
tactcttcgtcgct

SEQ ID NO: 8 - DNA, 14 bp, Artificial
  Synthesized antisense oligonucleotide
cttggcgtagtact

SEQ ID NO: 9 - DNA, 14 bp, Artificial
  Synthesized antisense oligonucleotide
gtaaacctccttgg

SEQ ID NO: 10 - DNA, 19 bp, Artificial
  Synthesized antisense oligonucleotide
gtctattttgtaaacctcc

SEQ ID NO: 11 - DNA, 20 bp, Artificial
  Synthesized antisense oligonucleotide
gcatgtctattttgtaaacc

SEQ ID NO: 12 - DNA, 14 bp, Artificial
  Synthesized antisense oligonucleotide
ggcatcaaggtacc

SEQ ID NO: 13 - DNA, 14 bp, Artificial
  Synthesized antisense oligonucleotide
ctgtagaaagtggg

SEQ ID NO: 14 - DNA, 18 bp, Artificial
  Synthesized antisense oligonucleotide
acaattctgaagtagggt

SEQ ID NO: 15 - DNA, 18 bp, Artificial
  Synthesized antisense oligonucleotide
tcaccaaattggaagcat

SEQ ID NO: 16 - DNA, 18 bp, Artificial
  Synthesized antisense oligonucleotide
tctgatatagctcaatcc

SEQ ID NO: 17 - DNA, 18 bp, Artificial
  Synthesized antisense oligonucleotide
tcctagtggactttatag

SEQ ID NO: 18 - DNA, 16 bp, Artificial
  Synthesized antisense oligonucleotide
tttttcctagtggact

SEQ ID NO: 19 - DNA, 19 bp, Artificial
  Synthesized antisense oligonucleotide
caattatcctgcacatttc

SEQ ID NO: 20 - DNA, 16 bp, Artificial
  Synthesized antisense oligonucleotide
gcaattatcctgcaca

SEQ ID NO: 21 - DNA, 16 bp, Artificial
  Synthesized antisense oligonucleotide
gcagcaattatcctgc

SEQ ID NO: 22 - DNA, 14 bp, Artificial
  Synthesized antisense oligonucleotide
tggcattgtaccct

SEQ ID NO: 23 - DNA, 14 bp, Artificial
  Synthesized antisense oligonucleotide
tgtgctgagtgtct

SEQ ID NO: 24 - DNA, 16 bp, Artificial
  Synthesized antisense oligonucleotide
cctgctgtgctgagtg

SEQ ID NO: 25 - DNA, 14 bp, Artificial
  Synthesized antisense oligonucleotide
cttgggtgttttgc

SEQ ID NO: 26 - DNA, 18 bp, Artificial
  Synthesized antisense oligonucleotide
tttagctgcatttgcaag

SEQ ID NO: 27 - DNA, 14 bp, Artificial
  Synthesized antisense oligonucleotide
gccacttttccaag

SEQ ID NO: 28 - DNA, 18 bp, Artificial
  Synthesized antisense oligonucleotide
ctgatgtgttgaagaaca

SEQ ID NO: 29 - DNA, 14 bp, Artificial
  Synthesized antisense oligonucleotide
cgatagtcttgcag

SEQ ID NO: 30 - DNA, 14 bp, Artificial
  Synthesized antisense oligonucleotide
gtcgatagtcttgc

SEQ ID NO: 31 - DNA, 14 bp, Artificial
  Synthesized antisense oligonucleotide
cttggacaggatct

SEQ ID NO: 32 - DNA, 14 bp, Artificial
  Synthesized antisense oligonucleotide
ccaggaattgttgc

SEQ ID NO: 33 - DNA, 14 bp, Artificial
  Synthesized antisense oligonucleotide
cctcaatttcccct

SEQ ID NO: 34 - DNA, 14 bp, Artificial
  Synthesized antisense oligonucleotide
gatgtccacttgca

SEQ ID NO: 35 - DNA, 14 bp, Artificial
  Synthesized antisense oligonucleotide
ctccaaatgtaggg

SEQ ID NO: 36 - DNA, 14 bp, Artificial
  Synthesized antisense oligonucleotide
accttgctgtactg

SEQ ID NO: 37 - DNA, 14 bp, Artificial
  Synthesized antisense oligonucleotide
gtagtacacgatgg

SEQ ID NO: 38 - DNA, 14 bp, Artificial
  Synthesized antisense oligonucleotide
cacgtagtacacga

SEQ ID NO: 39 - DNA, 14 bp, Artificial
  Synthesized antisense oligonucleotide
catgttggacagct

SEQ ID NO: 40 - DNA, 14 bp, Artificial
  Synthesized antisense oligonucleotide
gcacgatcatgttg

SEQ ID NO: 41 - DNA, 16 bp, Artificial
  Synthesized antisense oligonucleotide
tgtactctgcttgaac

SEQ ID NO: 42 - DNA, 16 bp, Artificial
  Synthesized antisense oligonucleotide
ctctgatgtgttgaag

SEQ ID NO: 43 - DNA, 16 bp, Artificial
  Synthesized antisense oligonucleotide
ggaagtcaatgtacag

SEQ ID NO: 44 - DNA, 18 bp, Artificial
  Synthesized antisense oligonucleotide
catgtcgatagtcttgca

SEQ ID NO: 45 - DNA, 18 bp, Artificial
  Synthesized antisense oligonucleotide
agctgaagcaatagttgg

SEQ ID NO: 46 - DNA, 18 bp, Artificial
  Synthesized antisense oligonucleotide
gtcatagatttcgttgtg

SEQ ID NO: 47 - DNA, 18 bp, Artificial
  Synthesized antisense oligonucleotide
ctccacttttaacttgag

SEQ ID NO: 48 - DNA, 18 bp, Artificial
  Synthesized antisense oligonucleotide
tgctgtatttctggtaca

SEQ ID NO: 49 - DNA, 14 bp, Artificial
  Synthesized antisense oligonucleotide
tcgagcttccccca

SEQ ID NO: 50 - DNA, 14 bp, Artificial
  Synthesized antisense oligonucleotide
ccccgagcccaagg

SEQ ID NO: 51 - DNA, 13 bp, Artificial
  Synthesized antisense oligonucleotide
cccgacgagccgg

SEQ ID NO: 52 - DNA, 14 bp, Artificial
  Synthesized antisense oligonucleotide
acgcaccaaggcga

SEQ ID NO: 53 - DNA, 15 bp, Artificial
  Synthesized antisense oligonucleotide
cgggttgtcgagccc

SEQ ID NO: 54 - DNA, 13 bp, Artificial
  Synthesized antisense oligonucleotide
cggcagtgccccg

SEQ ID NO: 55 - DNA, 14 bp, Artificial
  Synthesized antisense oligonucleotide
cgcaattctgctcg

SEQ ID NO: 56 - DNA, 14 bp, Artificial
  Synthesized antisense oligonucleotide
ttcgttgtgctccc

SEQ ID NO: 57 - DNA, 14 bp, Artificial
  Synthesized antisense oligonucleotide
attccgactcggtg

SEQ ID NO: 58 - DNA, 17 bp, Artificial
  Synthesized antisense oligonucleotide
acgtgcgtcatcaccgt

SEQ ID NO: 59 - DNA, 10 bp, Artificial
  Synthesized antisense oligonucleotide
ccaagaagcc

SEQ ID NO: 60 - DNA, 14 bp, Artificial
  Synthesized antisense oligonucleotide
cctaatgccttcca

SEQ ID NO: 61 - DNA, 14 bp, Artificial
  Synthesized antisense oligonucleotide
tcagcagggccagg

SEQ ID NO: 62 - DNA, 17 bp, Artificial
  Synthesized antisense oligonucleotide
gcaaagttcagcagggc

SEQ ID NO: 63 - DNA, 16 bp, Artificial
  Synthesized antisense oligonucleotide
ggcaaagttcagcagg

SEQ ID NO: 64 - DNA, 18 bp, Artificial
  Synthesized antisense oligonucleotide
gtggcaaagttcagcagg

SEQ ID NO: 65 - DNA, 14 bp, Artificial
  Synthesized antisense oligonucleotide
gtggcaaagttcag

SEQ ID NO: 66 - DNA, 18 bp, Artificial
  Synthesized antisense oligonucleotide
gaccgtggcaaagttcag

SEQ ID NO: 67 - DNA, 15 bp, Artificial
  Synthesized antisense oligonucleotide
agagaggctgaccgt

SEQ ID NO: 68 - DNA, 17 bp, Artificial
  Synthesized antisense oligonucleotide
gagagagagaggctgac

SEQ ID NO: 69 - DNA, 15 bp, Artificial
  Synthesized antisense oligonucleotide
acagagagaggctga

SEQ ID NO: 70 - DNA, 15 bp, Artificial
  Synthesized antisense oligonucleotide
gtggacagagagagg

SEQ ID NO: 71 - DNA, 18 bp, Artificial
  Synthesized antisense oligonucleotide
caactggacagagagagg

SEQ ID NO: 72 - DNA, 16 bp, Artificial
  Synthesized antisense oligonucleotide
tcttcttgatgtggcc

SEQ ID NO: 73 - DNA, 17 bp, Artificial
  Synthesized antisense oligonucleotide
ccctcttcttcttgatg

SEQ ID NO: 74 - DNA, 14 bp, Artificial
  Synthesized antisense oligonucleotide
caccctcttcttct

SEQ ID NO: 75 - DNA, 17 bp, Artificial
  Synthesized antisense oligonucleotide
atggatttctttggcat

SEQ ID NO: 76 - DNA, 13 bp, Artificial
  Synthesized antisense oligonucleotide
ggatttctttggc

SEQ ID NO: 77 - DNA, 18 bp, Artificial
  Synthesized antisense oligonucleotide
aagttggactctcttctc

SEQ ID NO: 78 - DNA, 18 bp, Artificial
  Synthesized antisense oligonucleotide
taagttggactctcttct

SEQ ID NO: 79 - DNA, 16 bp, Artificial
  Synthesized antisense oligonucleotide
taggagtggttgaggc

SEQ ID NO: 80 - DNA, 17 bp, Artificial
  Synthesized antisense oligonucleotide
gtgtaggagtggttgag

SEQ ID NO: 81 - DNA, 14 bp, Artificial
  Synthesized antisense oligonucleotide
ctgtgtaggagtgg

SEQ ID NO: 82 - DNA, 14 bp, Artificial
  Synthesized antisense oligonucleotide
cccacatgcctgtg

SEQ ID NO: 83 - DNA, 14 bp, Artificial
  Synthesized antisense oligonucleotide
cgatgaacaacgag

SEQ ID NO: 84 - DNA, 16 bp, Artificial
  Synthesized antisense oligonucleotide
ctggcgatgaacaacg

SEQ ID NO: 85 - DNA, 14 bp, Artificial
  Synthesized antisense oligonucleotide
cgctggcgatgaac

SEQ ID NO: 86 - DNA, 15 bp, Artificial
  Synthesized antisense oligonucleotide
gagctagtcccgttg

SEQ ID NO: 87 - DNA, 15 bp, Artificial
  Synthesized antisense oligonucleotide
gcgaagagctagtcc

SEQ ID NO: 88 - DNA, 17 bp, Artificial
  Synthesized antisense oligonucleotide
ccagttatgcgaagagc

SEQ ID NO: 89 - DNA, 16 bp, Artificial
  Synthesized antisense oligonucleotide
ccccagttatgcgaag

SEQ ID NO: 90 - DNA, 14 bp, Artificial
  Synthesized antisense oligonucleotide
cggccgcggtgtgt

SEQ ID NO: 91 - DNA, 17 bp, Artificial
  Synthesized antisense oligonucleotide
cgggaatgcttccgccg

SEQ ID NO: 92 - DNA, 17 bp, Artificial
  Synthesized antisense oligonucleotide
cggctcaccgcctcggc

SEQ ID NO: 93 - DNA, 14 bp, Artificial
  Synthesized antisense oligonucleotide
cacgtctgcggatc

SEQ ID NO: 94 - DNA, 18 bp, Artificial
  Synthesized antisense oligonucleotide
ccccgcatcgcatcaggg

SEQ ID NO: 95 - DNA, 14 bp, Artificial
  Synthesized antisense oligonucleotide
cgccttgcaacgcg

SEQ ID NO: 96 - DNA, 14 bp, Artificial
  Synthesized antisense oligonucleotide
ccgaccggggccgg

SEQ ID NO: 97 - DNA, 14 bp, Artificial
  Synthesized antisense oligonucleotide
gttcatggtttcgg

SEQ ID NO: 98 - DNA, 15 bp, Artificial
  Synthesized antisense oligonucleotide
gcagaaagttcatgg

SEQ ID NO: 99 - DNA, 14 bp, Artificial
  Synthesized antisense oligonucleotide
gctgatagacatcc

SEQ ID NO: 100 - DNA, 14 bp, Artificial
  Synthesized antisense oligonucleotide
gcgctgatagacat

SEQ ID NO: 101 - DNA, 16 bp, Artificial
  Synthesized antisense oligonucleotide
gtagctgcgctgatag

SEQ ID NO: 102 - DNA, 14 bp, Artificial
  Synthesized antisense oligonucleotide
ctcgatctcatcag

SEQ ID NO: 103 - DNA, 17 bp, Artificial
  Synthesized antisense oligonucleotide
atgtactcgatctcatc

SEQ ID NO: 104 - DNA, 16 bp, Artificial
  Synthesized antisense oligonucleotide
gaagatgtactcgatc

SEQ ID NO: 105 - DNA, 16 bp, Artificial
  Synthesized antisense oligonucleotide
cttgaagatgtactcg

SEQ ID NO: 106 - DNA, 14 bp, Artificial
  Synthesized antisense oligonucleotide
gcatcgcatcaggg

SEQ ID NO: 107 - DNA, 14 bp, Artificial
  Synthesized antisense oligonucleotide
ccgcatcgcatcag

SEQ ID NO: 108 - DNA, 18 bp, Artificial
  Synthesized antisense oligonucleotide
catttgttgtgctgtagg

SEQ ID NO: 109 - DNA, 18 bp, Artificial
  Synthesized antisense oligonucleotide
ggtctgcattcacatttg

SEQ ID NO: 110 - DNA, 15 bp, Artificial
  Synthesized antisense oligonucleotide
ctttggtctgcattc

SEQ ID NO: 111 - DNA, 15 bp, Artificial
  Synthesized antisense oligonucleotide
ctttctttggtctgc

SEQ ID NO: 112 - DNA, 17 bp, Artificial
  Synthesized antisense oligonucleotide
gctctatctttctttgg

SEQ ID NO: 113 - DNA, 17 bp, Artificial
  Synthesized antisense oligonucleotide
gtcttgctctatctttc

SEQ ID NO: 114 - DNA, 16 bp, Artificial
  Synthesized antisense oligonucleotide
cttgtcttgctctatc

SEQ ID NO: 115 - DNA, 18 bp, Artificial
  Synthesized antisense oligonucleotide
catctgcaagtacgttcg

SEQ ID NO: 116 - DNA, 18 bp, Artificial
  Synthesized antisense oligonucleotide
cacatctgcaagtacgtt

SEQ ID NO: 117 - DNA, 18 bp, Artificial
  Synthesized antisense oligonucleotide
gtcacatctgcaagtacg

SEQ ID NO: 118 - DNA, 14 bp, Artificial
  Synthesized antisense oligonucleotide
catctgcaagtacg

SEQ ID NO: 119 - DNA, 15 bp, Artificial
  Synthesized antisense oligonucleotide
cacatctgcaagtac

SEQ ID NO: 120 - DNA, 14 bp, Artificial
  Synthesized antisense oligonucleotide
gtcacatctgcaag

SEQ ID NO: 121 - DNA, 14 bp, Artificial
  Synthesized antisense oligonucleotide
cttgtcacatctgc

SEQ ID NO: 122 - DNA, 16 bp, Artificial
  Synthesized antisense oligonucleotide
ggcttgtcacatctgc

SEQ ID NO: 123 - DNA, 16 bp, Artificial
  Synthesized antisense oligonucleotide
ctcggcttgtcacatc

SEQ ID NO: 124 - DNA, 14 bp, Artificial
  Synthesized antisense oligonucleotide
ctccttcctcctgc

SEQ ID NO: 125 - DNA, 18 bp, Artificial
  Synthesized antisense oligonucleotide
gcttgaagatgtacctcg

SEQ ID NO: 126 - DNA, 15 bp, Artificial
  Synthesized antisense oligonucleotide
cgttgctctccgacg

SEQ ID NO: 127 - DNA, 18 bp, Artificial
  Synthesized antisense oligonucleotide
cttcttttgcaagtctgt

SEQ ID NO: 128 - DNA, 18 bp, Artificial
  Synthesized antisense oligonucleotide
tgagctgtgcatgccttc

SEQ ID NO: 129 - DNA, 15 bp, Artificial
  Synthesized antisense oligonucleotide
agtcaggaggaccag

SEQ ID NO: 130 - DNA, 15 bp, Artificial
  Synthesized antisense oligonucleotide
tgggtgccctggcct

SEQ ID NO: 131 - DNA, 15 bp, Artificial
  Synthesized antisense oligonucleotide
catgttaggcaggtt

SEQ ID NO: 132 - DNA, 17 bp, Artificial
  Synthesized antisense oligonucleotide
aggcatctcggagatct

SEQ ID NO: 133 - DNA, 16 bp, Artificial
  Synthesized antisense oligonucleotide
aaagtcttcactctgc

SEQ ID NO: 134 - DNA, 17 bp, Artificial
  Synthesized antisense oligonucleotide
aacaagttgtccagctg

SEQ ID NO: 135 - DNA, 18 bp, Artificial
  Synthesized antisense oligonucleotide
gtaaaactggatcatctc

SEQ ID NO: 136 - DNA, 15 bp, Artificial
  Synthesized antisense oligonucleotide
catcacctcctccag

SEQ ID NO: 137 - DNA, 18 bp, Artificial
  Synthesized antisense oligonucleotide
gggtcttcaggttctccc

SEQ ID NO: 138 - DNA, 18 bp, Artificial
  Synthesized antisense oligonucleotide
cacggccttgctcttgtt

SEQ ID NO: 139 - DNA, 18 bp, Artificial
  Synthesized antisense oligonucleotide
ttattaaaggcattcttc

SEQ ID NO: 140 - DNA, 18 bp, Artificial
  Synthesized antisense oligonucleotide
aagatgtcaaactcactc

SEQ ID NO: 141 - DNA, 18 bp, Artificial
  Synthesized antisense oligonucleotide
gtagttgatgaagatgtc

SEQ ID NO: 142 - DNA, 16 bp, Artificial
  Synthesized antisense oligonucleotide
gattttggagacctct

SEQ ID NO: 143 - DNA, 16 bp, Artificial
  Synthesized antisense oligonucleotide
tcagctatcccagagc

SEQ ID NO: 144 - DNA, 15 bp, Artificial
  Synthesized antisense oligonucleotide
ggctgggtcagctat

SEQ ID NO: 145 - DNA, 18 bp, Artificial
  Synthesized antisense oligonucleotide
aaatcgttcacagagaag

SEQ ID NO: 146 - DNA, 18 bp, Artificial
  Synthesized antisense oligonucleotide
tctttctaaatcgttcac

SEQ ID NO: 147 - DNA, 14 bp, Artificial
  Synthesized antisense oligonucleotide
ttcatgtctgtgcc

SEQ ID NO: 148 - DNA, 14 bp, Artificial
  Synthesized antisense oligonucleotide
gtaggtgagttcca

SEQ ID NO: 149 - DNA, 14 bp, Artificial
  Synthesized antisense oligonucleotide
gttgtgagcgatga

SEQ ID NO: 150 - DNA, 18 bp, Artificial
  Synthesized antisense oligonucleotide
catagttgtcctcaaaga

SEQ ID NO: 151 - DNA, 14 bp, Artificial
  Synthesized antisense oligonucleotide
ggcatagttgtcct

SEQ ID NO: 152 - DNA, 14 bp, Artificial
  Synthesized antisense oligonucleotide
cattgtctagcacg

SEQ ID NO: 153 - DNA, 14 bp, Artificial
  Synthesized antisense oligonucleotide
ctccattgtctagc

SEQ ID NO: 154 - DNA, 14 bp, Artificial
  Synthesized antisense oligonucleotide
gtattgttcagcgg

SEQ ID NO: 155 - DNA, 16 bp, Artificial
  Synthesized antisense oligonucleotide
tcaagatctctgtgag

SEQ ID NO: 156 - DNA, 16 bp, Artificial
  Synthesized antisense oligonucleotide
cacaaaatcgtgtcct

SEQ ID NO: 157 - DNA, 16 bp, Artificial
  Synthesized antisense oligonucleotide
tccttccacaaaatcg

SEQ ID NO: 158 - DNA, 14 bp, Artificial
  Synthesized antisense oligonucleotide
gtggaagatgtcct

SEQ ID NO: 159 - DNA, 16 bp, Artificial
  Synthesized antisense oligonucleotide
tcttgtggaagatgtc

SEQ ID NO: 160 - DNA, 16 bp, Artificial
  Synthesized antisense oligonucleotide
tctatcagtgtgagag

SEQ ID NO: 161 - DNA, 14 bp, Artificial
  Synthesized antisense oligonucleotide
ggttggtgtctatc

SEQ ID NO: 162 - DNA, 14 bp, Artificial
  Synthesized antisense oligonucleotide
acatcggagaacag

SEQ ID NO: 163 - DNA, 14 bp, Artificial
  Synthesized antisense oligonucleotide
ccttacacatcgga

SEQ ID NO: 164 - DNA, 16 bp, Artificial
  Synthesized antisense oligonucleotide
acaatcctcagaactc

SEQ ID NO: 165 - DNA, 14 bp, Artificial
  Synthesized antisense oligonucleotide
gctctgacaatcct

SEQ ID NO: 166 - DNA, 14 bp, Artificial
  Synthesized antisense oligonucleotide
tggttgaagtggag

SEQ ID NO: 167 - DNA, 14 bp, Artificial
  Synthesized antisense oligonucleotide
ctgtggttgaagtg

SEQ ID NO: 168 - DNA, 14 bp, Artificial
  Synthesized antisense oligonucleotide
gttgtaggtgacca

SEQ ID NO: 169 - DNA, 14 bp, Artificial
  Synthesized antisense oligonucleotide
ctgtgttgtaggtg

SEQ ID NO: 170 - DNA, 14 bp, Artificial
  Synthesized antisense oligonucleotide
gactcaaacgtgtc

SEQ ID NO: 171 - DNA, 14 bp, Artificial
  Synthesized antisense oligonucleotide
catggactcaaacg

SEQ ID NO: 172 - DNA, 14 bp, Artificial
  Synthesized antisense oligonucleotide
cgaatgtataccgg

SEQ ID NO: 173 - DNA, 14 bp, Artificial
  Synthesized antisense oligonucleotide
ccgaatgtataccg

SEQ ID NO: 174 - DNA, 14 bp, Artificial
  Synthesized antisense oligonucleotide
gccgaatgtatacc

SEQ ID NO: 175 - DNA, 14 bp, Artificial
  Synthesized antisense oligonucleotide
gtagttgtagggac

SEQ ID NO: 176 - DNA, 18 bp, Artificial
  Synthesized antisense oligonucleotide
tagaaaggtagttgtagg

SEQ ID NO: 177 - DNA, 18 bp, Artificial
  Synthesized antisense oligonucleotide
gtagaaaggtagttgtag

SEQ ID NO: 178 - DNA, 16 bp, Artificial
  Synthesized antisense oligonucleotide
cgtagaaaggtagttg

SEQ ID NO: 179 - DNA, 14 bp, Artificial
  Synthesized antisense oligonucleotide
ccgtagaaaggtag

SEQ ID NO: 180 - DNA, 14 bp, Artificial
  Synthesized antisense oligonucleotide
gaccatagcacact

SEQ ID NO: 181 - DNA, 14 bp, Artificial
  Synthesized antisense oligonucleotide
ggatattggcactg

SEQ ID NO: 182 - DNA, 14 bp, Artificial
  Synthesized antisense oligonucleotide
cctggatattggca

SEQ ID NO: 183 - DNA, 14 bp, Artificial
  Synthesized antisense oligonucleotide
gctcccaaagatct

SEQ ID NO: 184 - DNA, 14 bp, Artificial
  Synthesized antisense oligonucleotide
cccatcaaagctct

SEQ ID NO: 185 - DNA, 14 bp, Artificial
  Synthesized antisense oligonucleotide
caaacacttggagc

SEQ ID NO: 186 - DNA, 16 bp, Artificial
  Synthesized antisense oligonucleotide
gtctcaaacacttgga

SEQ ID NO: 187 - DNA, 16 bp, Artificial
  Synthesized antisense oligonucleotide
gagtctcaaacacttg

SEQ ID NO: 188 - DNA, 16 bp, Artificial
  Synthesized antisense oligonucleotide
gtaacctgtgatctct

SEQ ID NO: 189 - DNA, 14 bp, Artificial
  Synthesized antisense oligonucleotide
ggtaacctgtgatc

SEQ ID NO: 190 - DNA, 16 bp, Artificial
  Synthesized antisense oligonucleotide
gtataggtaacctgtg

SEQ ID NO: 191 - DNA, 18 bp, Artificial
  Synthesized antisense oligonucleotide
tgagatgtataggtaacc

SEQ ID NO: 192 - DNA, 16 bp, Artificial
  Synthesized antisense oligonucleotide
tgctgagatgtatagg

SEQ ID NO: 193 - DNA, 14 bp, Artificial
  Synthesized antisense oligonucleotide
ccatgctgagatgt

SEQ ID NO: 194 - DNA, 14 bp, Artificial
  Synthesized antisense oligonucleotide
ggattacttgcagg

SEQ ID NO: 195 - DNA, 16 bp, Artificial
  Synthesized antisense oligonucleotide
tgttatggtggatgag

SEQ ID NO: 196 - DNA, 14 bp, Artificial
  Synthesized antisense oligonucleotide
ggtgttatggtgga

SEQ ID NO: 197 - DNA, 14 bp, Artificial
  Synthesized antisense oligonucleotide
gcagttgacacact

SEQ ID NO: 198 - DNA, 14 bp, Artificial
  Synthesized antisense oligonucleotide
agtactcggcattc

SEQ ID NO: 199 - DNA, 16 bp, Artificial
  Synthesized antisense oligonucleotide
cattcacatactccct

SEQ ID NO: 200 - DNA, 16 bp, Artificial
  Synthesized antisense oligonucleotide
tccaaaacaggtcact

SEQ ID NO: 201 - DNA, 14 bp, Artificial
  Synthesized antisense oligonucleotide
ggtccttatagtgg

SEQ ID NO: 202 - DNA, 14 bp, Artificial
  Synthesized antisense oligonucleotide
cagaatgccaacca

SEQ ID NO: 203 - DNA, 14 bp, Artificial
  Synthesized antisense oligonucleotide
acgagaatgccaac

SEQ ID NO: 204 - DNA, 14 bp, Artificial
  Synthesized antisense oligonucleotide
gatcccaaagacca

SEQ ID NO: 205 - DNA, 14 bp, Artificial
  Synthesized antisense oligonucleotide
tcgcttgatgagga

SEQ ID NO: 206 - DNA, 14 bp, Artificial
  Synthesized antisense oligonucleotide
catcgtgtacttcc

SEQ ID NO: 207 - DNA, 14 bp, Artificial
  Synthesized antisense oligonucleotide
gcatcgtgtacttc

SEQ ID NO: 208 - DNA, 14 bp, Artificial
  Synthesized antisense oligonucleotide
actgtgccaaaagc

SEQ ID NO: 209 - DNA, 14 bp, Artificial
  Synthesized antisense oligonucleotide
cttgtagactgtgc

SEQ ID NO: 210 - DNA, 14 bp, Artificial
  Synthesized antisense oligonucleotide
cccttgtagactgt

SEQ ID NO: 211 - DNA, 16 bp, Artificial
  Synthesized antisense oligonucleotide
tcaacactttgatggc

SEQ ID NO: 212 - DNA, 14 bp, Artificial
  Synthesized antisense oligonucleotide
ccctcaacactttg

SEQ ID NO: 213 - DNA, 16 bp, Artificial
  Synthesized antisense oligonucleotide
gtgttttccctcaaca

SEQ ID NO: 214 - DNA, 16 bp, Artificial
  Synthesized antisense oligonucleotide
gtatgcttcgtctaag

SEQ ID NO: 215 - DNA, 14 bp, Artificial
  Synthesized antisense oligonucleotide
cgtatgcttcgtct

SEQ ID NO: 216 - DNA, 14 bp, Artificial
  Synthesized antisense oligonucleotide
ccatcacgtatgct

SEQ ID NO: 217 - DNA, 14 bp, Artificial
  Synthesized antisense oligonucleotide
gcataagctgtgtc

SEQ ID NO: 218 - DNA, 14 bp, Artificial
  Synthesized antisense oligonucleotide
catggtctaagagg

SEQ ID NO: 219 - DNA, 16 bp, Artificial
  Synthesized antisense oligonucleotide
caatctgcatacacca

SEQ ID NO: 220 - DNA, 14 bp, Artificial
  Synthesized antisense oligonucleotide
ggcaatctgcatac

SEQ ID NO: 221 - DNA, 14 bp, Artificial
  Synthesized antisense oligonucleotide
ctgtctcgtcaatg

SEQ ID NO: 222 - DNA, 16 bp, Artificial
  Synthesized antisense oligonucleotide
cataactccacacatc

SEQ ID NO: 223 - DNA, 16 bp, Artificial
  Synthesized antisense oligonucleotide
agtcacaccataactc

SEQ ID NO: 224 - DNA, 16 bp, Artificial
  Synthesized antisense oligonucleotide
acagtcacaccataac

SEQ ID NO: 225 - DNA, 14 bp, Artificial
  Synthesized antisense oligonucleotide
ccccaaaagtcatc

SEQ ID NO: 226 - DNA, 14 bp, Artificial
  Synthesized antisense oligonucleotide
tcgtaaggtttggc

SEQ ID NO: 227 - DNA, 14 bp, Artificial
  Synthesized antisense oligonucleotide
gatcccatcgtaag

SEQ ID NO: 228 - DNA, 14 bp, Artificial
  Synthesized antisense oligonucleotide
caatggtgcagatg

SEQ ID NO: 229 - DNA, 14 bp, Artificial
  Synthesized antisense oligonucleotide
gacatcaatggtgc

SEQ ID NO: 230 - DNA, 16 bp, Artificial
  Synthesized antisense oligonucleotide
gtagacatcaatggtg

SEQ ID NO: 231 - DNA, 18 bp, Artificial
  Synthesized antisense oligonucleotide
catgatcatgtagacatc

SEQ ID NO: 232 - DNA, 16 bp, Artificial
  Synthesized antisense oligonucleotide
ccatgatcatgtagac

SEQ ID NO: 233 - DNA, 18 bp, Artificial
  Synthesized antisense oligonucleotide
catttgaccatgatcatg

SEQ ID NO: 234 - DNA, 16 bp, Artificial
  Synthesized antisense oligonucleotide
ccaacatttgaccatg

SEQ ID NO: 235 - DNA, 18 bp, Artificial
  Synthesized antisense oligonucleotide
tcatccaacatttgacca

SEQ ID NO: 236 - DNA, 18 bp, Artificial
  Synthesized antisense oligonucleotide
gagtcaatcatccaacat

SEQ ID NO: 237 - DNA, 16 bp, Artificial
  Synthesized antisense oligonucleotide
cagagtcaatcatcca

SEQ ID NO: 238 - DNA, 14 bp, Artificial
  Synthesized antisense oligonucleotide
ccgacattcagagt

SEQ ID NO: 239 - DNA, 16 bp, Artificial
  Synthesized antisense oligonucleotide
gaattcagacaccaac

SEQ ID NO: 240 - DNA, 14 bp, Artificial
  Synthesized antisense oligonucleotide
gatgaccacaaagc

SEQ ID NO: 241 - DNA, 16 bp, Artificial
  Synthesized antisense oligonucleotide
ccatcaaatacatcgg

SEQ ID NO: 242 - DNA, 18 bp, Artificial
  Synthesized antisense oligonucleotide
tcaccatcaaatacatcg

SEQ ID NO: 243 - DNA, 14 bp, Artificial
  Synthesized antisense oligonucleotide
caacgtagccatca

SEQ ID NO: 244 - DNA, 14 bp, Artificial
  Synthesized antisense oligonucleotide
acgtctttgacgac

SEQ ID NO: 245 - DNA, 18 bp, Artificial
  Synthesized antisense oligonucleotide
caaaaacgtctttgacga

SEQ ID NO: 246 - DNA, 16 bp, Artificial
  Synthesized antisense oligonucleotide
ggcaaaaacgtctttg

SEQ ID NO: 247 - DNA, 16 bp, Artificial
  Synthesized antisense oligonucleotide
caaaggcaaaaacgtc

SEQ ID NO: 248 - DNA, 14 bp, Artificial
  Synthesized antisense oligonucleotide
gtgtcaagtactcg

SEQ ID NO: 249 - DNA, 16 bp, Artificial
  Synthesized antisense oligonucleotide
gtaatagaggttgtcg

SEQ ID NO: 250 - DNA, 14 bp, Artificial
  Synthesized antisense oligonucleotide
cccagtaatagagg

SEQ ID NO: 251 - DNA, 14 bp, Artificial
  Synthesized antisense oligonucleotide
catggtgctcactg

SEQ ID NO: 252 - DNA, 14 bp, Artificial
  Synthesized antisense oligonucleotide
gtgcctgtacgtac

SEQ ID NO: 253 - DNA, 14 bp, Artificial
  Synthesized antisense oligonucleotide
tcggactatactgc

SEQ ID NO: 254 - DNA, 16 bp, Artificial
  Synthesized antisense oligonucleotide
cagttcggactatact

SEQ ID NO: 255 - DNA, 14 bp, Artificial
  Synthesized antisense oligonucleotide
aagcctaagacgca

SEQ ID NO: 256 - DNA, 14 bp, Artificial
  Synthesized antisense oligonucleotide
gcccaagttcaaca

SEQ ID NO: 257 - DNA, 14 bp, Artificial
  Synthesized antisense oligonucleotide
tgaaaagtcgcggt

SEQ ID NO: 258 - DNA, 18 bp, Artificial
  Synthesized antisense oligonucleotide
ggttaattaagatgcctc

SEQ ID NO: 259 - DNA, 14 bp, Artificial
  Synthesized antisense oligonucleotide
tctctaagagcgca

SEQ ID NO: 260 - DNA, 16 bp, Artificial
  Synthesized antisense oligonucleotide
acgtgaggttagtttg

SEQ ID NO: 261 - DNA, 14 bp, Artificial
  Synthesized antisense oligonucleotide
cacgtgaggttagt

SEQ ID NO: 262 - DNA, 14 bp, Artificial
  Synthesized antisense oligonucleotide
catagaacagtccg

SEQ ID NO: 263 - DNA, 16 bp, Artificial
  Synthesized antisense oligonucleotide
cagtcatagaacagtc

SEQ ID NO: 264 - DNA, 18 bp, Artificial
  Synthesized antisense oligonucleotide
ctttgcagtcatagaaca

SEQ ID NO: 265 - DNA, 14 bp, Artificial
  Synthesized antisense oligonucleotide
tgcagtcatagaac

SEQ ID NO: 266 - DNA, 14 bp, Artificial
  Synthesized antisense oligonucleotide
ggtcgtttccatct

SEQ ID NO: 267 - DNA, 16 bp, Artificial
  Synthesized antisense oligonucleotide
catagaaggtcgtttc

SEQ ID NO: 268 - DNA, 14 bp, Artificial
  Synthesized antisense oligonucleotide
cgtcatagaaggtc

SEQ ID NO: 269 - DNA, 15 bp, Artificial
  Synthesized antisense oligonucleotide
catcgtcatagaagg

SEQ ID NO: 270 - DNA, 24 bp, Artificial
  Synthesized antisense oligonucleotide
ggacgggaggaacgaggcgttgag

SEQ ID NO: 271 - DNA, 14 bp, Artificial
  Synthesized antisense oligonucleotide
tagccataaggtcc

SEQ ID NO: 272 - DNA, 14 bp, Artificial
  Synthesized antisense oligonucleotide
ggttactgtagcca

SEQ ID NO: 273 - DNA, 14 bp, Artificial
  Synthesized antisense oligonucleotide
ggttactgtagcca

SEQ ID NO: 274 - DNA, 30 bp, Artificial
  Synthesized antisense oligonucleotide
cagggtcatgctctgtttcaggatcttggg

SEQ ID NO: 275 - DNA, 18 bp, Artificial
  Synthesized antisense oligonucleotide
agttcttggcgcggaggt

SEQ ID NO: 276 - DNA, 18 bp, Artificial
  Synthesized antisense oligonucleotide
aggtgaggaggtccgagt

SEQ ID NO: 277 - DNA, 16 bp, Artificial
  Synthesized antisense oligonucleotide
tggactggattatcag

SEQ ID NO: 278 - DNA, 18 bp, Artificial
  Synthesized antisense oligonucleotide
gtggtggtgatgtgcccg

SEQ ID NO: 279 - DNA, 14 bp, Artificial
  Synthesized antisense oligonucleotide
tgtcacgttcttgg

SEQ ID NO: 280 - DNA, 14 bp, Artificial
  Synthesized antisense oligonucleotide
ctcatctgtcacgt

SEQ ID NO: 281 - DNA, 18 bp, Artificial
  Synthesized antisense oligonucleotide
cgaagccctcggcgaacc

SEQ ID NO: 282 - DNA, 24 bp, Artificial
  Synthesized antisense oligonucleotide
gcgtgttctggctgtgcagttcgg

SEQ ID NO: 283 - DNA, 14 bp, Artificial
  Synthesized antisense oligonucleotide
ctgccccgttgacc

SEQ ID NO: 284 - DNA, 14 bp, Artificial
  Synthesized antisense oligonucleotide
aggtttgcgtagac

SEQ ID NO: 285 - DNA, 14 bp, Artificial
  Synthesized antisense oligonucleotide
ggttgaagttgctg

SEQ ID NO: 286 - DNA, 14 bp, Artificial
  Synthesized antisense oligonucleotide
ctgggttgaagttg

SEQ ID NO: 287 - DNA, 24 bp, Artificial
  Synthesized antisense oligonucleotide
tgctggggttgcgcgggaaaggcc

SEQ ID NO: 288 - DNA, 20 bp, Artificial
  Synthesized antisense oligonucleotide
tgctgcacgggcatctgctg

SEQ ID NO: 289 - DNA, 27 bp, Artificial
  Synthesized antisense oligonucleotide
ggcactgtctgaggctcctccttcagg

SEQ ID NO: 290 - DNA, 14 bp, Artificial
  Synthesized antisense oligonucleotide
actccatgtcgatg

SEQ ID NO: 291 - DNA, 16 bp, Artificial
  Synthesized antisense oligonucleotide
ctctccgccttgatcc

SEQ ID NO: 292 - DNA, 16 bp, Artificial
  Synthesized antisense oligonucleotide
gttcctcatgcgcttc

SEQ ID NO: 293 - DNA, 14 bp, Artificial
  Synthesized antisense oligonucleotide
ctgagctttcaagg

SEQ ID NO: 294 - DNA, 26 bp, Artificial
  Synthesized antisense oligonucleotide
gcgattctctccagcttcctttttcg

SEQ ID NO: 295 - DNA, 30 bp, Artificial
  Synthesized antisense oligonucleotide
ctgagctttcaaggttttcactttttcctc

SEQ ID NO: 296 - DNA, 14 bp, Artificial
  Synthesized antisense oligonucleotide
tccctgagcatgtt

SEQ ID NO: 297 - DNA, 16 bp, Artificial
  Synthesized antisense oligonucleotide
tctgtttaagctgtgc

SEQ ID NO: 298 - DNA, 18 bp, Artificial
  Synthesized antisense oligonucleotide
ctttctgtttaagctgtg

SEQ ID NO: 299 - DNA, 16 bp, Artificial
  Synthesized antisense oligonucleotide
ggttcatgactttctg

SEQ ID NO: 300 - DNA, 14 bp, Artificial
  Synthesized antisense oligonucleotide
cgtggttcatgact

SEQ ID NO: 301 - DNA, 16 bp, Artificial
  Synthesized antisense oligonucleotide
actgttaacgtggttc

SEQ ID NO: 302 - DNA, 14 bp, Artificial
  Synthesized antisense oligonucleotide
ccactgttaacgtg

SEQ ID NO: 303 - DNA, 14 bp, Artificial
  Synthesized antisense oligonucleotide
cccactgttaacgt

SEQ ID NO: 304 - DNA, 14 bp, Artificial
  Synthesized antisense oligonucleotide
agcatgagttggca

SEQ ID NO: 305 - DNA, 14 bp, Artificial
  Synthesized antisense oligonucleotide
gcgttagcatgagt

SEQ ID NO: 306 - DNA, 14 bp, Artificial
  Synthesized antisense oligonucleotide
gtttgcaactgctg

SEQ ID NO: 307 - DNA, 18 bp, Artificial
  Synthesized antisense oligonucleotide
caaaatgtttgcaactgc

SEQ ID NO: 308 - DNA, 14 bp, Artificial
  Synthesized antisense oligonucleotide
tcgtagaaggtcgt

SEQ ID NO: 309 - DNA, 14 bp, Artificial
  Synthesized antisense oligonucleotide
agggttactgtagc

SEQ ID NO: 310 - DNA, 14 bp, Artificial
  Synthesized antisense oligonucleotide
gtagtggtgatgtg

SEQ ID NO: 311 - DNA, 14 bp, Artificial
  Synthesized antisense oligonucleotide
cgtcgtagaaggtc

SEQ ID NO: 312 - DNA, 14 bp, Artificial
  Synthesized antisense oligonucleotide
cgagaacatcatcg

SEQ ID NO: 313 - DNA, 14 bp, Artificial
  Synthesized antisense oligonucleotide
gtagtctgcgttga

SEQ ID NO: 314 - DNA, 20 bp, Artificial
  Synthesized antisense oligonucleotide
gctgcagcgggaggatgacg

SEQ ID NO: 315 - DNA, 16 bp, Artificial
  Synthesized antisense oligonucleotide
agtaagagaggctatc

SEQ ID NO: 316 - DNA, 14 bp, Artificial
  Synthesized antisense oligonucleotide
gtagtaagagaggc

SEQ ID NO: 317 - DNA, 14 bp, Artificial
  Synthesized antisense oligonucleotide
ggtagtaagagagg

SEQ ID NO: 318 - DNA, 16 bp, Artificial
  Synthesized antisense oligonucleotide
gtgagtggtagtaaga

SEQ ID NO: 319 - DNA, 18 bp, Artificial
  Synthesized antisense oligonucleotide
gtccgtgcagaagtcctg

SEQ ID NO: 320 - DNA, 16 bp, Artificial
  Synthesized antisense oligonucleotide
gaatgaagttggcact

SEQ ID NO: 321 - DNA, 14 bp, Artificial
  Synthesized antisense oligonucleotide
ggaatgaagttggc

SEQ ID NO: 322 - DNA, 14 bp, Artificial
  Synthesized antisense oligonucleotide
gggaatgaagttgg

SEQ ID NO: 323 - DNA, 30 bp, Artificial
  Synthesized antisense oligonucleotide
gctgcaccagccactgcaggtccggactgg

SEQ ID NO: 324 - DNA, 30 bp, Artificial
  Synthesized antisense oligonucleotide
ctggtctgcgatggggccacagaggagacg

SEQ ID NO: 325 - DNA, 16 bp, Artificial
  Synthesized antisense oligonucleotide
tcatggtcttcacaac

SEQ ID NO: 326 - DNA, 30 bp, Artificial
  Synthesized antisense oligonucleotide
caatgctctgcgctcggcctcctgtcatgg

SEQ ID NO: 327 - DNA, 14 bp, Artificial
  Synthesized antisense oligonucleotide
ctagagttcctcac

SEQ ID NO: 328 - DNA, 14 bp, Artificial
  Synthesized antisense oligonucleotide
gagtacgctagagt

SEQ ID NO: 329 - DNA, 14 bp, Artificial
  Synthesized antisense oligonucleotide
gaagagtacgctag

SEQ ID NO: 330 - DNA, 28 bp, Artificial
  Synthesized antisense oligonucleotide
ctgcttcccacccagcccccacattccc

SEQ ID NO: 331 - DNA, 20 bp, Artificial
  Synthesized antisense oligonucleotide
ttcatcctctgtactgggct

SEQ ID NO: 332 - DNA, 14 bp, Artificial
  Synthesized antisense oligonucleotide
gttacggatgtgca

SEQ ID NO: 333 - DNA, 14 bp, Artificial
  Synthesized antisense oligonucleotide
cagttacggatgtg

SEQ ID NO: 334 - DNA, 14 bp, Artificial
  Synthesized antisense oligonucleotide
ccagttacggatgt

SEQ ID NO: 335 - DNA, 14 bp, Artificial
  Synthesized antisense oligonucleotide
agagtctgagttgg

SEQ ID NO: 336 - DNA, 14 bp, Artificial
  Synthesized antisense oligonucleotide
gtgagactcagagt

SEQ ID NO: 337 - DNA, 14 bp, Artificial
  Synthesized antisense oligonucleotide
tcttagggtgagac

SEQ ID NO: 338 - DNA, 16 bp, Artificial
  Synthesized antisense oligonucleotide
gagagtacttcttagg

SEQ ID NO: 339 - DNA, 18 bp, Artificial
  Synthesized antisense oligonucleotide
ggaagaaactatgagagt

SEQ ID NO: 340 - DNA, 18 bp, Artificial
  Synthesized antisense oligonucleotide
cttagggaagaaactatg

SEQ ID NO: 341 - DNA, 16 bp, Artificial
  Synthesized antisense oligonucleotide
cggtaagaaacttagg

SEQ ID NO: 342 - DNA, 14 bp, Artificial
  Synthesized antisense oligonucleotide
agcatgcggtaaga

SEQ ID NO: 343 - DNA, 14 bp, Artificial
  Synthesized antisense oligonucleotide
gtctgaaagcatgc

SEQ ID NO: 344 - DNA, 16 bp, Artificial
  Synthesized antisense oligonucleotide
agaacaaagaagagcc

SEQ ID NO: 345 - DNA, 18 bp, Artificial
  Synthesized antisense oligonucleotide
caagagaacaaagaagag

SEQ ID NO: 346 - DNA, 16 bp, Artificial
  Synthesized antisense oligonucleotide
cagcaagagaacaaag

SEQ ID NO: 347 - DNA, 14 bp, Artificial
  Synthesized antisense oligonucleotide
tcctcagcaagaga

SEQ ID NO: 348 - DNA, 14 bp, Artificial
  Synthesized antisense oligonucleotide
aggtgtgacttgca

SEQ ID NO: 349 - DNA, 16 bp, Artificial
  Synthesized antisense oligonucleotide
gaataggtgtgacttg

SEQ ID NO: 350 - DNA, 16 bp, Artificial
  Synthesized antisense oligonucleotide
cagaataggtgtgact

SEQ ID NO: 351 - DNA, 14 bp, Artificial
  Synthesized antisense oligonucleotide
gcagaataggtgtg

SEQ ID NO: 352 - DNA, 16 bp, Artificial
  Synthesized antisense oligonucleotide
cagttgcagaataggt

SEQ ID NO: 353 - DNA, 16 bp, Artificial
  Synthesized antisense oligonucleotide
gaaaccatttctgacc

SEQ ID NO: 354 - DNA, 18 bp, Artificial
  Synthesized antisense oligonucleotide
tgtgaaaccatttctgac

SEQ ID NO: 355 - DNA, 18 bp, Artificial
  Synthesized antisense oligonucleotide
cactgtgaaaccatttct

SEQ ID NO: 356 - DNA, 14 bp, Artificial
  Synthesized antisense oligonucleotide
ccactgtgaaacca

SEQ ID NO: 357 - DNA, 30 bp, Artificial
  Synthesized antisense oligonucleotide
agaactggctcctgcagcttccctgcttcc

SEQ ID NO: 358 - DNA, 15 bp, Artificial
  Synthesized antisense oligonucleotide
cacctccattcaccc

SEQ ID NO: 359 - DNA, 16 bp, Artificial
  Synthesized antisense oligonucleotide
cagtaaaagtgtctgc

SEQ ID NO: 360 - DNA, 18 bp, Artificial
  Synthesized antisense oligonucleotide
cgacattcagtaaaagtg

SEQ ID NO: 361 - DNA, 14 bp, Artificial
  Synthesized antisense oligonucleotide
gaccgacattcagt

SEQ ID NO: 362 - DNA, 18 bp, Artificial
  Synthesized antisense oligonucleotide
cttctggagataactaga

SEQ ID NO: 363 - DNA, 18 bp, Artificial
  Synthesized antisense oligonucleotide
catcttattcctttccct

SEQ ID NO: 364 - DNA, 16 bp, Artificial
  Synthesized antisense oligonucleotide
cagccatcttattcct

SEQ ID NO: 365 - DNA, 16 bp, Artificial
  Synthesized antisense oligonucleotide
tgcagccatcttattc

SEQ ID NO: 366 - DNA, 15 bp, Artificial
  Synthesized antisense oligonucleotide
gagtgtatcagtcag

SEQ ID NO: 367 - DNA, 14 bp, Artificial
  Synthesized antisense oligonucleotide
ggagtgtatcagtc

SEQ ID NO: 368 - DNA, 16 bp, Artificial
  Synthesized antisense oligonucleotide
cttggagtgtatcagt

SEQ ID NO: 369 - DNA, 14 bp, Artificial
  Synthesized antisense oligonucleotide
acagagtacctacc

SEQ ID NO: 370 - DNA, 16 bp, Artificial
  Synthesized antisense oligonucleotide
ccaactttcccttaag

SEQ ID NO: 371 - DNA, 16 bp, Artificial
  Synthesized antisense oligonucleotide
ccttatgctcaatctc

SEQ ID NO: 372 - DNA, 14 bp, Artificial
  Synthesized antisense oligonucleotide
gtcttactcaaggg

SEQ ID NO: 373 - DNA, 16 bp, Artificial
  Synthesized antisense oligonucleotide
acagtcttactcaagg

SEQ ID NO: 374 - DNA, 18 bp, Artificial
  Synthesized antisense oligonucleotide
cataagacacagtcttac

SEQ ID NO: 375 - DNA, 18 bp, Artificial
  Synthesized antisense oligonucleotide
gaaagcataagacacagt

SEQ ID NO: 376 - DNA, 16 bp, Artificial
  Synthesized antisense oligonucleotide
ggaaagcataagacac

SEQ ID NO: 377 - DNA, 16 bp, Artificial
  Synthesized antisense oligonucleotide
agggataaaggaaagc

SEQ ID NO: 378 - DNA, 14 bp, Artificial
  Synthesized antisense oligonucleotide
cctgtatacagagg

SEQ ID NO: 379 - DNA, 16 bp, Artificial
  Synthesized antisense oligonucleotide
tgtctcctgtatacag

SEQ ID NO: 380 - DNA, 16 bp, Artificial
  Synthesized antisense oligonucleotide
catcttctagttggtc

SEQ ID NO: 381 - DNA, 16 bp, Artificial
  Synthesized antisense oligonucleotide
ctcatcttctagttgg

SEQ ID NO: 382 - DNA, 18 bp, Artificial
  Synthesized antisense oligonucleotide
cttctcatcttctagttg

SEQ ID NO: 383 - DNA, 16 bp, Artificial
  Synthesized antisense oligonucleotide
caaagcagacttctca

SEQ ID NO: 384 - DNA, 14 bp, Artificial
  Synthesized antisense oligonucleotide
ctgcaaagcagact

SEQ ID NO: 385 - DNA, 18 bp, Artificial
  Synthesized antisense oligonucleotide
ctagtttttccttctcct

SEQ ID NO: 386 - DNA, 18 bp, Artificial
  Synthesized antisense oligonucleotide
tctagtttttccttctcc

SEQ ID NO: 387 - DNA, 16 bp, Artificial
  Synthesized antisense oligonucleotide
caggatgaactctagt

SEQ ID NO: 388 - DNA, 14 bp, Artificial
  Synthesized antisense oligonucleotide
cgagaacatcatgg

SEQ ID NO: 389 - DNA, 14 bp, Artificial
  Synthesized antisense oligonucleotide
gtagtaggaaaggc

SEQ ID NO: 390 - DNA, 14 bp, Artificial
  Synthesized antisense oligonucleotide
ggtagtaggaaagg

SEQ ID NO: 391 - DNA, 14 bp, Artificial
  Synthesized antisense oligonucleotide
ggaatggtagtagg

SEQ ID NO: 392 - DNA, 15 bp, Artificial
  Synthesized antisense oligonucleotide
ggtcattgagaagag

SEQ ID NO: 393 - DNA, 16 bp, Artificial
  Synthesized antisense oligonucleotide
gctaatgttcttgacc

SEQ ID NO: 394 - DNA, 15 bp, Artificial
  Synthesized antisense oligonucleotide
gtcaggaatcggcag

SEQ ID NO: 395 - DNA, 16 bp, Artificial
  Synthesized antisense oligonucleotide
cttggagaagacatac

SEQ ID NO: 396 - DNA, 14 bp, Artificial
  Synthesized antisense oligonucleotide
tgcctccccagaag

SEQ ID NO: 397 - DNA, 17 bp, Artificial
  Synthesized antisense oligonucleotide
cactggcagtagaaatc

SEQ ID NO: 398 - DNA, 15 bp, Artificial
  Synthesized antisense oligonucleotide
gctcactggcagtag

SEQ ID NO: 399 - DNA, 14 bp, Artificial
  Synthesized antisense oligonucleotide
atggtcaggaatcg

SEQ ID NO: 400 - DNA, 16 bp, Artificial
  Synthesized antisense oligonucleotide
gaatggtcaggaatcg

SEQ ID NO: 401 - DNA, 14 bp, Artificial
  Synthesized antisense oligonucleotide
catcgtggactgtg

SEQ ID NO: 402 - DNA, 14 bp, Artificial
  Synthesized antisense oligonucleotide
agccatggagatag

SEQ ID NO: 403 - DNA, 15 bp, Artificial
  Synthesized antisense oligonucleotide
cagccatggagatag

SEQ ID NO: 404 - DNA, 16 bp, Artificial
  Synthesized antisense oligonucleotide
acagccatggagatag

SEQ ID NO: 405 - DNA, 17 bp, Artificial
  Synthesized antisense oligonucleotide
cacagccatggagatag

SEQ ID NO: 406 - DNA, 16 bp, Artificial
  Synthesized antisense oligonucleotide
ccacagccatggagat

SEQ ID NO: 407 - DNA, 14 bp, Artificial
  Synthesized antisense oligonucleotide
gccatggagatagg

SEQ ID NO: 408 - DNA, 15 bp, Artificial
  Synthesized antisense oligonucleotide
agccatggagatagg

SEQ ID NO: 409 - DNA, 16 bp, Artificial
  Synthesized antisense oligonucleotide
cagccatggagatagg

SEQ ID NO: 410 - DNA, 17 bp, Artificial
  Synthesized antisense oligonucleotide
acagccatggagatagg

SEQ ID NO: 411 - DNA, 14 bp, Artificial
  Synthesized antisense oligonucleotide
catggagatagggt

SEQ ID NO: 412 - DNA, 15 bp, Artificial
  Synthesized antisense oligonucleotide
catggagatagggtg

SEQ ID NO: 413 - DNA, 16 bp, Artificial
  Synthesized antisense oligonucleotide
catggagatagggtgg

SEQ ID NO: 414 - DNA, 14 bp, Artificial
  Synthesized antisense oligonucleotide
atggagatagggtg

SEQ ID NO: 415 - DNA, 15 bp, Artificial
  Synthesized antisense oligonucleotide
atggagatagggtgg

SEQ ID NO: 416 - DNA, 16 bp, Artificial
  Synthesized antisense oligonucleotide
atggagatagggtggc

SEQ ID NO: 417 - DNA, 17 bp, Artificial
  Synthesized antisense oligonucleotide
atggagatagggtggct

SEQ ID NO: 418 - DNA, 14 bp, Artificial
  Synthesized antisense oligonucleotide
ggagatagggtggc

SEQ ID NO: 419 - DNA, 15 bp, Artificial
  Synthesized antisense oligonucleotide
ggagatagggtggct

SEQ ID NO: 420 - DNA, 14 bp, Artificial
  Synthesized antisense oligonucleotide
gaaatagcccaggc

SEQ ID NO: 421 - DNA, 15 bp, Artificial
  Synthesized antisense oligonucleotide
gaaatagcccaggcg

SEQ ID NO: 422 - DNA, 17 bp, Artificial
  Synthesized antisense oligonucleotide
gaaatagcccaggcgag

SEQ ID NO: 423 - DNA, 14 bp, Artificial
  Synthesized antisense oligonucleotide
ggaaatagcccagg

SEQ ID NO: 424 - DNA, 15 bp, Artificial
  Synthesized antisense oligonucleotide
ggaaatagcccaggc

SEQ ID NO: 425 - DNA, 14 bp, Artificial
  Synthesized antisense oligonucleotide
gtcttcacatcgac

SEQ ID NO: 426 - DNA, 15 bp, Artificial
  Synthesized antisense oligonucleotide
gtcttcacatcgact

SEQ ID NO: 427 - DNA, 16 bp, Artificial
  Synthesized antisense oligonucleotide
gtcttcacatcgactt

SEQ ID NO: 428 - DNA, 17 bp, Artificial
  Synthesized antisense oligonucleotide
gtcttcacatcgacttt

SEQ ID NO: 429 - DNA, 18 bp, Artificial
  Synthesized antisense oligonucleotide
gtcttcacatcgactttg

SEQ ID NO: 430 - DNA, 18 bp, Artificial
  Synthesized antisense oligonucleotide
gtcttcacatcgactttg

SEQ ID NO: 431 - DNA, 18 bp, Artificial
  Synthesized antisense oligonucleotide
ccatttgtctgtcttcac

SEQ ID NO: 432 - DNA, 20 bp, Artificial
  Synthesized antisense oligonucleotide
gtgccatcaatacctgcaaa

SEQ ID NO: 433 - DNA, 20 bp, Artificial
  Synthesized antisense oligonucleotide
catcagttacatcgaaggag

SEQ ID NO: 434 - DNA, 20 bp, Artificial
  Synthesized antisense oligonucleotide
tcttgggacacgcagcaagg

SEQ ID NO: 435 - DNA, 20 bp, Artificial
  Synthesized antisense oligonucleotide
gaaatcaatgtaaagtggac

SEQ ID NO: 436 - DNA, 20 bp, Artificial
  Synthesized antisense oligonucleotide
catgaactggtccatatcga

SEQ ID NO: 437 - DNA, 20 bp, Artificial
  Synthesized antisense oligonucleotide
gaggttctaaatcttgggac

SEQ ID NO: 438 - DNA, 20 bp, Artificial
  Synthesized antisense oligonucleotide
gcactctggcttttgggttc

SEQ ID NO: 439 - DNA, 20 bp, Artificial
  Synthesized antisense oligonucleotide
tagctcaatccgttgttcag

SEQ ID NO: 440 - DNA, 20 bp, Artificial
  Synthesized antisense oligonucleotide
ccctagatccctcttgaaat

SEQ ID NO: 441 - DNA, 20 bp, Artificial
  Synthesized antisense oligonucleotide
accaaggctctcttatgttt

SEQ ID NO: 442 - DNA, 20 bp, Artificial
  Synthesized antisense oligonucleotide
tcgagtgtgctgcaggtaga

SEQ ID NO: 443 - DNA, 20 bp, Artificial
  Synthesized antisense oligonucleotide
tgaacagcatcagttacatc

SEQ ID NO: 444 - DNA, 20 bp, Artificial
  Synthesized antisense oligonucleotide
gctgggttggagatgttaaa

SEQ ID NO: 445 - DNA, 20 bp, Artificial
  Synthesized antisense oligonucleotide
agaggttctaaatcttggga

SEQ ID NO: 446 - DNA, 20 bp, Artificial
  Synthesized antisense oligonucleotide
cgccggttggtctgttgtga

SEQ ID NO: 447 - DNA, 20 bp, Artificial
  Synthesized antisense oligonucleotide
ctgctttcaccaaattggaa

SEQ ID NO: 448 - DNA, 20 bp, Artificial
  Synthesized antisense oligonucleotide
aagtatagatcaaggagagt

SEQ ID NO: 449 - DNA, 20 bp, Artificial
  Synthesized antisense oligonucleotide
tgctcaggatctgcccgcgg

SEQ ID NO: 450 - DNA, 20 bp, Artificial
  Synthesized antisense oligonucleotide
gtgctgttgtagatggaaat

SEQ ID NO: 451 - DNA, 20 bp, Artificial
  Synthesized antisense oligonucleotide
agggcggcatgtctattttg

SEQ ID NO: 452 - DNA, 20 bp, Artificial
  Synthesized antisense oligonucleotide
taagcttattttaaatccca

SEQ ID NO: 453 - DNA, 20 bp, Artificial
  Synthesized antisense oligonucleotide
tagctgcatttgcaagactt

SEQ ID NO: 454 - DNA, 20 bp, Artificial
  Synthesized antisense oligonucleotide
tctgttgtgactcaagtctg

SEQ ID NO: 455 - DNA, 20 bp, Artificial
  Synthesized antisense oligonucleotide
aagcaataggccgcatccaa

SEQ ID NO: 456 - DNA, 20 bp, Artificial
  Synthesized antisense oligonucleotide
tcaatgtaaagtggacgtag

SEQ ID NO: 457 - DNA, 20 bp, Artificial
  Synthesized antisense oligonucleotide
attttagctgcatttgcaag

SEQ ID NO: 458 - DNA, 20 bp, Artificial
  Synthesized antisense oligonucleotide
tgtagatggaaatcacctcc

SEQ ID NO: 459 - DNA, 20 bp, Artificial
  Synthesized antisense oligonucleotide
ttaacactgatgaaccaagg

SEQ ID NO: 460 - DNA, 20 bp, Artificial
  Synthesized antisense oligonucleotide
attgtaccctttgggttcgt

SEQ ID NO: 461 - DNA, 20 bp, Artificial
  Synthesized antisense oligonucleotide
agatccctcttgaaatcaat

SEQ ID NO: 462 - DNA, 20 bp, Artificial
  Synthesized antisense oligonucleotide
tgtaaagtggacgtaggcag

SEQ ID NO: 463 - DNA, 20 bp, Artificial
  Synthesized antisense oligonucleotide
ccattcgccttctgctcttg

SEQ ID NO: 464 - DNA, 20 bp, Artificial
  Synthesized antisense oligonucleotide
tgttaaatctttggacttga

SEQ ID NO: 465 - DNA, 20 bp, Artificial
  Synthesized antisense oligonucleotide
gaagggcggcatgtctattt

SEQ ID NO: 466 - DNA, 20 bp, Artificial
  Synthesized antisense oligonucleotide
gaccctgctgtgctgagtgt

SEQ ID NO: 467 - DNA, 20 bp, Artificial
  Synthesized antisense oligonucleotide
gaactagtaccgccttttca

SEQ ID NO: 468 - DNA, 20 bp, Artificial
  Synthesized antisense oligonucleotide
cgatcctcttgcgcatgaac

SEQ ID NO: 469 - DNA, 20 bp, Artificial
  Synthesized antisense oligonucleotide
ccggccaaaagggaagagat

SEQ ID NO: 470 - DNA, 20 bp, Artificial
  Synthesized antisense oligonucleotide
aaagagacgagtggctatta

SEQ ID NO: 471 - DNA, 20 bp, Artificial
  Synthesized antisense oligonucleotide
aagtggaaatattaatacgg

SEQ ID NO: 472 - DNA, 20 bp, Artificial
  Synthesized antisense oligonucleotide
agatcaaggagagttgtttg

SEQ ID NO: 473 - DNA, 20 bp, Artificial
  Synthesized antisense oligonucleotide
agttgtttttaaaagtcaga

SEQ ID NO: 474 - DNA, 20 bp, Artificial
  Synthesized antisense oligonucleotide
tgtaacaactgggcagacag

SEQ ID NO: 475 - DNA, 20 bp, Artificial
  Synthesized antisense oligonucleotide
ggtgttgtaacaactgggca

SEQ ID NO: 476 - DNA, 20 bp, Artificial
  Synthesized antisense oligonucleotide
tacccacagagcacctggga

SEQ ID NO: 477 - DNA, 20 bp, Artificial
  Synthesized antisense oligonucleotide
gggatggcatcaaggtaccc

SEQ ID NO: 478 - DNA, 20 bp, Artificial
  Synthesized antisense oligonucleotide
tcgtcatcatcattatcatc

SEQ ID NO: 479 - DNA, 20 bp, Artificial
  Synthesized antisense oligonucleotide
aagggtgcctattgcatagc

SEQ ID NO: 480 - DNA, 20 bp, Artificial
  Synthesized antisense oligonucleotide
ctcactgttaactctaagag

SEQ ID NO: 481 - DNA, 20 bp, Artificial
  Synthesized antisense oligonucleotide
gcaaagtatttggtctccac

SEQ ID NO: 482 - DNA, 20 bp, Artificial
  Synthesized antisense oligonucleotide
caagttccttaagccatcca

SEQ ID NO: 483 - DNA, 20 bp, Artificial
  Synthesized antisense oligonucleotide
ttatcttaatgcagactttc

SEQ ID NO: 484 - DNA, 20 bp, Artificial
  Synthesized antisense oligonucleotide
cttacaagaagcttccttag

SEQ ID NO: 485 - DNA, 20 bp, Artificial
  Synthesized antisense oligonucleotide
actggtgagcttcagcttgc

SEQ ID NO: 486 - DNA, 20 bp, Artificial
  Synthesized antisense oligonucleotide
acttgagaatctgatatagc

SEQ ID NO: 487 - DNA, 20 bp, Artificial
  Synthesized antisense oligonucleotide
aggttcctgtctttatggtg

SEQ ID NO: 488 - DNA, 20 bp, Artificial
  Synthesized antisense oligonucleotide
gtgtatccatttccacccta

SEQ ID NO: 489 - DNA, 20 bp, Artificial
  Synthesized antisense oligonucleotide
cagcacagaagttggcattg

SEQ ID NO: 490 - DNA, 20 bp, Artificial
  Synthesized antisense oligonucleotide
gcaaggagaagcagatgctt

SEQ ID NO: 491 - DNA, 20 bp, Artificial
  Synthesized antisense oligonucleotide
agcaaggagaagcagatgct

SEQ ID NO: 492 - DNA, 20 bp, Artificial
  Synthesized antisense oligonucleotide
ttttccaagaattttagctg

SEQ ID NO: 493 - DNA, 20 bp, Artificial
  Synthesized antisense oligonucleotide
ttcttgttacaagcatcatc

SEQ ID NO: 494 - DNA, 20 bp, Artificial
  Synthesized antisense oligonucleotide
ttaaagaaggagcggttcgg

SEQ ID NO: 495 - DNA, 20 bp, Artificial
  Synthesized antisense oligonucleotide
ctgggctgaaatttatatat

SEQ ID NO: 496 - DNA, 20 bp, Artificial
  Synthesized antisense oligonucleotide
gggcagacagctaggagttt

SEQ ID NO: 497 - DNA, 20 bp, Artificial
  Synthesized antisense oligonucleotide
gtgtactcaccaaggtaccc

SEQ ID NO: 498 - DNA, 20 bp, Artificial
  Synthesized antisense oligonucleotide
cccagcactttgggaggccg

SEQ ID NO: 499 - DNA, 20 bp, Artificial
  Synthesized antisense oligonucleotide
ggctcacgcctgtaatccca

SEQ ID NO: 500 - DNA, 20 bp, Artificial
  Synthesized antisense oligonucleotide
tgaccgtgaactcactattt

SEQ ID NO: 501 - DNA, 20 bp, Artificial
  Synthesized antisense oligonucleotide
atagtggtgatggctataca

SEQ ID NO: 502 - DNA, 20 bp, Artificial
  Synthesized antisense oligonucleotide
ttttggttacctgcaaatct

SEQ ID NO: 503 - DNA, 20 bp, Artificial
  Synthesized antisense oligonucleotide
gaacactcaccctgctgtgc

SEQ ID NO: 504 - DNA, 20 bp, Artificial
  Synthesized antisense oligonucleotide
gaatggctctttaaacccta

SEQ ID NO: 505 - DNA, 20 bp, Artificial
  Synthesized antisense oligonucleotide
gaagaaatggagttcagtgt

SEQ ID NO: 506 - DNA, 20 bp, Artificial
  Synthesized antisense oligonucleotide
tttctcctggaagggagagg

SEQ ID NO: 507 - DNA, 20 bp, Artificial
  Synthesized antisense oligonucleotide
aaatgcaacgcgttcccaac

SEQ ID NO: 508 - DNA, 20 bp, Artificial
  Synthesized antisense oligonucleotide
aatacgaaacttttgcaaag

SEQ ID NO: 509 - DNA, 20 bp, Artificial
  Synthesized antisense oligonucleotide
actagtaattctcagagcgg

SEQ ID NO: 510 - DNA, 20 bp, Artificial
  Synthesized antisense oligonucleotide
aagaaactagtaattctcag

SEQ ID NO: 511 - DNA, 20 bp, Artificial
  Synthesized antisense oligonucleotide
agtgcatgtttttaaaagga

SEQ ID NO: 512 - DNA, 20 bp, Artificial
  Synthesized antisense oligonucleotide
cagtagtgcatgtttttaaa

SEQ ID NO: 513 - DNA, 20 bp, Artificial
  Synthesized antisense oligonucleotide
ctcagcacacagtagtgcat

SEQ ID NO: 514 - DNA, 20 bp, Artificial
  Synthesized antisense oligonucleotide
agatgcaggagcaaaaaggt

SEQ ID NO: 515 - DNA, 20 bp, Artificial
  Synthesized antisense oligonucleotide
caggtagacagactgagcgc

SEQ ID NO: 516 - DNA, 20 bp, Artificial
  Synthesized antisense oligonucleotide
gcctcgatcctcttgcgcat

SEQ ID NO: 517 - DNA, 20 bp, Artificial
  Synthesized antisense oligonucleotide
gcggatggcctcgatcctct

SEQ ID NO: 518 - DNA, 20 bp, Artificial
  Synthesized antisense oligonucleotide
ctcaggatctgcccgcggat

SEQ ID NO: 519 - DNA, 20 bp, Artificial
  Synthesized antisense oligonucleotide
gctccggatagtcttccggg

SEQ ID NO: 520 - DNA, 20 bp, Artificial
  Synthesized antisense oligonucleotide
agatggaaatcacctccggg

SEQ ID NO: 521 - DNA, 20 bp, Artificial
  Synthesized antisense oligonucleotide
gttgtagatggaaatcacct

SEQ ID NO: 522 - DNA, 20 bp, Artificial
  Synthesized antisense oligonucleotide
ctggtactgttgtagatgga

SEQ ID NO: 523 - DNA, 20 bp, Artificial
  Synthesized antisense oligonucleotide
aggcggctgccctccggctt

SEQ ID NO: 524 - DNA, 20 bp, Artificial
  Synthesized antisense oligonucleotide
aacctccttggcgtagtact

SEQ ID NO: 525 - DNA, 20 bp, Artificial
  Synthesized antisense oligonucleotide
attttataaacctccttggc

SEQ ID NO: 526 - DNA, 20 bp, Artificial
  Synthesized antisense oligonucleotide
cggcatgtcgattttataaa

SEQ ID NO: 527 - DNA, 20 bp, Artificial
  Synthesized antisense oligonucleotide
cgggatggcattttcggagg

SEQ ID NO: 528 - DNA, 20 bp, Artificial
  Synthesized antisense oligonucleotide
gtagggtctgtagaaagtgg

SEQ ID NO: 529 - DNA, 20 bp, Artificial
  Synthesized antisense oligonucleotide
tgaagtagggtctgtagaaa

SEQ ID NO: 530 - DNA, 20 bp, Artificial
  Synthesized antisense oligonucleotide
attctgaagtagggtctgta

SEQ ID NO: 531 - DNA, 20 bp, Artificial
  Synthesized antisense oligonucleotide
aagcggacgattctgaagta

SEQ ID NO: 532 - DNA, 20 bp, Artificial
  Synthesized antisense oligonucleotide
cccaggttcctgtctttgtg

SEQ ID NO: 533 - DNA, 20 bp, Artificial
  Synthesized antisense oligonucleotide
ggcagtgtaaacttatttta

SEQ ID NO: 534 - DNA, 20 bp, Artificial
  Synthesized antisense oligonucleotide
ccatcaatacctgcaaatct

SEQ ID NO: 535 - DNA, 20 bp, Artificial
  Synthesized antisense oligonucleotide
aggtgccatcaatacctgca

SEQ ID NO: 536 - DNA, 20 bp, Artificial
  Synthesized antisense oligonucleotide
agttttctgatcaccactgg

SEQ ID NO: 537 - DNA, 20 bp, Artificial
  Synthesized antisense oligonucleotide
ttatagttttctgatcacca

SEQ ID NO: 538 - DNA, 20 bp, Artificial
  Synthesized antisense oligonucleotide
cctagtggactttatagttt

SEQ ID NO: 539 - DNA, 20 bp, Artificial
  Synthesized antisense oligonucleotide
acattagcaggagatgtggg

SEQ ID NO: 540 - DNA, 20 bp, Artificial
  Synthesized antisense oligonucleotide
agggcaacaacattagcagg

SEQ ID NO: 541 - DNA, 20 bp, Artificial
  Synthesized antisense oligonucleotide
actccagtctgtaggagggc

SEQ ID NO: 542 - DNA, 20 bp, Artificial
  Synthesized antisense oligonucleotide
tcctgcacatttctaaagca

SEQ ID NO: 543 - DNA, 20 bp, Artificial
  Synthesized antisense oligonucleotide
cagcaattatcctgcacatt

SEQ ID NO: 544 - DNA, 20 bp, Artificial
  Synthesized antisense oligonucleotide
atgtaaagagggcgaaggca

SEQ ID NO: 545 - DNA, 20 bp, Artificial
  Synthesized antisense oligonucleotide
ctcttaaaatcaatgtaaag

SEQ ID NO: 546 - DNA, 20 bp, Artificial
  Synthesized antisense oligonucleotide
ccaagatccctcttaaaatc

SEQ ID NO: 547 - DNA, 20 bp, Artificial
  Synthesized antisense oligonucleotide
cctttgggttcatggatcca

SEQ ID NO: 548 - DNA, 20 bp, Artificial
  Synthesized antisense oligonucleotide
gcattgtaccctttgggttc

SEQ ID NO: 549 - DNA, 20 bp, Artificial
  Synthesized antisense oligonucleotide
gcacagaagttagcattgta

SEQ ID NO: 550 - DNA, 20 bp, Artificial
  Synthesized antisense oligonucleotide
ctgaggactttggtgtgttg

SEQ ID NO: 551 - DNA, 20 bp, Artificial
  Synthesized antisense oligonucleotide
tcctgggacacacagcaagg

SEQ ID NO: 552 - DNA, 20 bp, Artificial
  Synthesized antisense oligonucleotide
tttagctgcatttacaagac

SEQ ID NO: 553 - DNA, 20 bp, Artificial
  Synthesized antisense oligonucleotide
caaggactttagctgcattt

SEQ ID NO: 554 - DNA, 20 bp, Artificial
  Synthesized antisense oligonucleotide
gtcattgtcaccgtgatttt

SEQ ID NO: 555 - DNA, 20 bp, Artificial
  Synthesized antisense oligonucleotide
ccagttttaacaaacagaac

SEQ ID NO: 556 - DNA, 20 bp, Artificial
  Synthesized antisense oligonucleotide
agatgccagttttaacaaac

SEQ ID NO: 557 - DNA, 20 bp, Artificial
  Synthesized antisense oligonucleotide
gttcattatatagtaacaca

SEQ ID NO: 558 - DNA, 20 bp, Artificial
  Synthesized antisense oligonucleotide
atgaaaggttcattatatag

SEQ ID NO: 559 - DNA, 20 bp, Artificial
  Synthesized antisense oligonucleotide
ttccaagggtaatgaaaggt

SEQ ID NO: 560 - DNA, 20 bp, Artificial
  Synthesized antisense oligonucleotide
cttaagccatccatgagttt

SEQ ID NO: 561 - DNA, 20 bp, Artificial
  Synthesized antisense oligonucleotide
cctggcttatttgagttcaa

SEQ ID NO: 562 - DNA, 20 bp, Artificial
  Synthesized antisense oligonucleotide
ttagtcctataacaactcac

SEQ ID NO: 563 - DNA, 20 bp, Artificial
  Synthesized antisense oligonucleotide
gcaaagaaccatttacaatt

SEQ ID NO: 564 - DNA, 20 bp, Artificial
  Synthesized antisense oligonucleotide
cttgcttaaactggcaaaga

SEQ ID NO: 565 - DNA, 20 bp, Artificial
  Synthesized antisense oligonucleotide
acatgtaaagtagttactgt

SEQ ID NO: 566 - DNA, 20 bp, Artificial
  Synthesized antisense oligonucleotide
acacattacatgtaaagtag

SEQ ID NO: 567 - DNA, 20 bp, Artificial
  Synthesized antisense oligonucleotide
taagatctacacattacatg

SEQ ID NO: 568 - DNA, 20 bp, Artificial
  Synthesized antisense oligonucleotide
attcaaaggtactggccagc

SEQ ID NO: 569 - DNA, 20 bp, Artificial
  Synthesized antisense oligonucleotide
tttgtagtgcaagtcaaaat

SEQ ID NO: 570 - DNA, 20 bp, Artificial
  Synthesized antisense oligonucleotide
catgtcattaaatggacaat

SEQ ID NO: 571 - DNA, 20 bp, Artificial
  Synthesized antisense oligonucleotide
cctacatttgtgcgaacttc

SEQ ID NO: 572 - DNA, 20 bp, Artificial
  Synthesized antisense oligonucleotide
ttccccctttgaaaaactca

SEQ ID NO: 573 - DNA, 20 bp, Artificial
  Synthesized antisense oligonucleotide
tttttaatcagcctgcaaag

SEQ ID NO: 574 - DNA, 20 bp, Artificial
  Synthesized antisense oligonucleotide
actgggcagacagtttcgga

SEQ ID NO: 575 - DNA, 20 bp, Artificial
  Synthesized antisense oligonucleotide
taacaactgggcagacagtt

SEQ ID NO: 576 - DNA, 20 bp, Artificial
  Synthesized antisense oligonucleotide
tgttgtaacaactgggcaga

SEQ ID NO: 577 - DNA, 20 bp, Artificial
  Synthesized antisense oligonucleotide
cacagagcacctgggactgt

SEQ ID NO: 578 - DNA, 20 bp, Artificial
  Synthesized antisense oligonucleotide
gtacccacagagcacctggg

SEQ ID NO: 579 - DNA, 20 bp, Artificial
  Synthesized antisense oligonucleotide
tcaaggtacccacagagcac

SEQ ID NO: 580 - DNA, 20 bp, Artificial
  Synthesized antisense oligonucleotide
tggcatcaaggtacccacag

SEQ ID NO: 581 - DNA, 20 bp, Artificial
  Synthesized antisense oligonucleotide
ggcgggatggcatcaaggta

SEQ ID NO: 582 - DNA, 20 bp, Artificial
  Synthesized antisense oligonucleotide
tttgcaggtattgatggcac

SEQ ID NO: 583 - DNA, 20 bp, Artificial
  Synthesized antisense oligonucleotide
ctccttcgatgtaactgatg

SEQ ID NO: 584 - DNA, 20 bp, Artificial
  Synthesized antisense oligonucleotide
ccttgctgcgtgtcccaaga

SEQ ID NO: 585 - DNA, 20 bp, Artificial
  Synthesized antisense oligonucleotide
tcgatatggaccagttcatg

SEQ ID NO: 586 - DNA, 20 bp, Artificial
  Synthesized antisense oligonucleotide
gtcccaagatttagaacctc

SEQ ID NO: 587 - DNA, 20 bp, Artificial
  Synthesized antisense oligonucleotide
gaacccaaaagccagagtgc

SEQ ID NO: 588 - DNA, 20 bp, Artificial
  Synthesized antisense oligonucleotide
atttcaagagggatctaggg

SEQ ID NO: 589 - DNA, 20 bp, Artificial
  Synthesized antisense oligonucleotide
aaacataagagagccttggt

SEQ ID NO: 590 - DNA, 20 bp, Artificial
  Synthesized antisense oligonucleotide
tctacctgcagcacactcga

SEQ ID NO: 591 - DNA, 20 bp, Artificial
  Synthesized antisense oligonucleotide
tcacaacagaccaaccggcg

SEQ ID NO: 592 - DNA, 20 bp, Artificial
  Synthesized antisense oligonucleotide
ttccaatttggtgaaagcag

SEQ ID NO: 593 - DNA, 20 bp, Artificial
  Synthesized antisense oligonucleotide
actctccttgatctatactt

SEQ ID NO: 594 - DNA, 20 bp, Artificial
  Synthesized antisense oligonucleotide
ccgcgggcagatcctgagca

SEQ ID NO: 595 - DNA, 20 bp, Artificial
  Synthesized antisense oligonucleotide
caaaatagacatgccgccct

SEQ ID NO: 596 - DNA, 20 bp, Artificial
  Synthesized antisense oligonucleotide
tgggatttaaaataagctta

SEQ ID NO: 597 - DNA, 20 bp, Artificial
  Synthesized antisense oligonucleotide
cagacttgagtcacaacaga

SEQ ID NO: 598 - DNA, 20 bp, Artificial
  Synthesized antisense oligonucleotide
ttggatgcggcctattgctt

SEQ ID NO: 599 - DNA, 20 bp, Artificial
  Synthesized antisense oligonucleotide
ctacgtccactttacattga

SEQ ID NO: 600 - DNA, 20 bp, Artificial
  Synthesized antisense oligonucleotide
ggaggtgatttccatctaca

SEQ ID NO: 601 - DNA, 20 bp, Artificial
  Synthesized antisense oligonucleotide
ccttggttcatcagtgttaa

SEQ ID NO: 602 - DNA, 20 bp, Artificial
  Synthesized antisense oligonucleotide
acgaacccaaagggtacaat

SEQ ID NO: 603 - DNA, 20 bp, Artificial
  Synthesized antisense oligonucleotide
attgatttcaagagggatct

SEQ ID NO: 604 - DNA, 20 bp, Artificial
  Synthesized antisense oligonucleotide
ctgcctacgtccactttaca

SEQ ID NO: 605 - DNA, 20 bp, Artificial
  Synthesized antisense oligonucleotide
caagagcagaaggcgaatgg

SEQ ID NO: 606 - DNA, 20 bp, Artificial
  Synthesized antisense oligonucleotide
tcaagtccaaagatttaaca

SEQ ID NO: 607 - DNA, 20 bp, Artificial
  Synthesized antisense oligonucleotide
aaatagacatgccgcccttc

SEQ ID NO: 608 - DNA, 20 bp, Artificial
  Synthesized antisense oligonucleotide
acactcagcacagcagggtc

SEQ ID NO: 609 - DNA, 20 bp, Artificial
  Synthesized antisense oligonucleotide
tgaaaaggcggtactagttc

SEQ ID NO: 610 - DNA, 20 bp, Artificial
  Synthesized antisense oligonucleotide
gttcatgcgcaagaggatcg

SEQ ID NO: 611 - DNA, 20 bp, Artificial
  Synthesized antisense oligonucleotide
atctcttcccttttggccgg

SEQ ID NO: 612 - DNA, 20 bp, Artificial
  Synthesized antisense oligonucleotide
taatagccactcgtctcttt

SEQ ID NO: 613 - DNA, 20 bp, Artificial
  Synthesized antisense oligonucleotide
ccgtattaatatttccactt

SEQ ID NO: 614 - DNA, 20 bp, Artificial
  Synthesized antisense oligonucleotide
caaacaactctccttgatct

SEQ ID NO: 615 - DNA, 20 bp, Artificial
  Synthesized antisense oligonucleotide
ctgtctgcccagttgttaca

SEQ ID NO: 616 - DNA, 20 bp, Artificial
  Synthesized antisense oligonucleotide
tgcccagttgttacaacacc

SEQ ID NO: 617 - DNA, 20 bp, Artificial
  Synthesized antisense oligonucleotide
tcccaggtgctctgtgggta

SEQ ID NO: 618 - DNA, 20 bp, Artificial
  Synthesized antisense oligonucleotide
gatgataatgatgatgacga

SEQ ID NO: 619 - DNA, 20 bp, Artificial
  Synthesized antisense oligonucleotide
gctatgcaataggcaccctt

SEQ ID NO: 620 - DNA, 20 bp, Artificial
  Synthesized antisense oligonucleotide
ctcttagagttaacagtgag

SEQ ID NO: 621 - DNA, 20 bp, Artificial
  Synthesized antisense oligonucleotide
gtggagaccaaatactttgc

SEQ ID NO: 622 - DNA, 20 bp, Artificial
  Synthesized antisense oligonucleotide
gaaagtctgcattaagataa

SEQ ID NO: 623 - DNA, 20 bp, Artificial
  Synthesized antisense oligonucleotide
ctaaggaagcttcttgtaag

SEQ ID NO: 624 - DNA, 20 bp, Artificial
  Synthesized antisense oligonucleotide
gcaagctgaagctcaccagt

SEQ ID NO: 625 - DNA, 20 bp, Artificial
  Synthesized antisense oligonucleotide
tagggtggaaatggatacac

SEQ ID NO: 626 - DNA, 20 bp, Artificial
  Synthesized antisense oligonucleotide
caatgccaacttctgtgctg

SEQ ID NO: 627 - DNA, 20 bp, Artificial
  Synthesized antisense oligonucleotide
aagcatctgcttctccttgc

SEQ ID NO: 628 - DNA, 20 bp, Artificial
  Synthesized antisense oligonucleotide
cagctaaaattcttggaaaa

SEQ ID NO: 629 - DNA, 20 bp, Artificial
  Synthesized antisense oligonucleotide
gatgatgcttgtaacaagaa

SEQ ID NO: 630 - DNA, 20 bp, Artificial
  Synthesized antisense oligonucleotide
aaactcctagctgtctgccc

SEQ ID NO: 631 - DNA, 20 bp, Artificial
  Synthesized antisense oligonucleotide
gggtaccttggtgagtacac

SEQ ID NO: 632 - DNA, 20 bp, Artificial
  Synthesized antisense oligonucleotide
cggcctcccaaagtgctggg

SEQ ID NO: 633 - DNA, 20 bp, Artificial
  Synthesized antisense oligonucleotide
tgggattacaggcgtgagcc

SEQ ID NO: 634 - DNA, 20 bp, Artificial
  Synthesized antisense oligonucleotide
tgtatagccatcaccactat

SEQ ID NO: 635 - DNA, 20 bp, Artificial
  Synthesized antisense oligonucleotide
acactgaactccatttcttc

SEQ ID NO: 636 - DNA, 20 bp, Artificial
  Synthesized antisense oligonucleotide
cctctcccttccaggagaaa

SEQ ID NO: 637 - DNA, 20 bp, Artificial
  Synthesized antisense oligonucleotide
gttgggaacgcgttgcattt

SEQ ID NO: 638 - DNA, 20 bp, Artificial
  Synthesized antisense oligonucleotide
ccgctctgagaattactagt

SEQ ID NO: 639 - DNA, 20 bp, Artificial
  Synthesized antisense oligonucleotide
ctgagaattactagtttctt

SEQ ID NO: 640 - DNA, 20 bp, Artificial
  Synthesized antisense oligonucleotide
tttaaaaacatgcactactg

SEQ ID NO: 641 - DNA, 20 bp, Artificial
  Synthesized antisense oligonucleotide
atgcactactgtgtgctgag

SEQ ID NO: 642 - DNA, 20 bp, Artificial
  Synthesized antisense oligonucleotide
gcgctcagtctgtctacctg

SEQ ID NO: 643 - DNA, 20 bp, Artificial
  Synthesized antisense oligonucleotide
atgcgcaagaggatcgaggc

SEQ ID NO: 644 - DNA, 20 bp, Artificial
  Synthesized antisense oligonucleotide
agaggatcgaggccatccgc

SEQ ID NO: 645 - DNA, 20 bp, Artificial
  Synthesized antisense oligonucleotide
atccgcgggcagatcctgag

SEQ ID NO: 646 - DNA, 20 bp, Artificial
  Synthesized antisense oligonucleotide
cccggaagactatccggagc

SEQ ID NO: 647 - DNA, 20 bp, Artificial
  Synthesized antisense oligonucleotide
cccggaggtgatttccatct

SEQ ID NO: 648 - DNA, 20 bp, Artificial
  Synthesized antisense oligonucleotide
aggtgatttccatctacaac

SEQ ID NO: 649 - DNA, 20 bp, Artificial
  Synthesized antisense oligonucleotide
tccatctacaacagtaccag

SEQ ID NO: 650 - DNA, 20 bp, Artificial
  Synthesized antisense oligonucleotide
aagccggagggcagccgcct

SEQ ID NO: 651 - DNA, 20 bp, Artificial
  Synthesized antisense oligonucleotide
agtactacgccaaggaggtt

SEQ ID NO: 652 - DNA, 20 bp, Artificial
  Synthesized antisense oligonucleotide
gccaaggaggtttataaaat

SEQ ID NO: 653 - DNA, 20 bp, Artificial
  Synthesized antisense oligonucleotide
tttataaaatcgacatgccg

SEQ ID NO: 654 - DNA, 20 bp, Artificial
  Synthesized antisense oligonucleotide
cctccgaaaatgccatcccg

SEQ ID NO: 655 - DNA, 20 bp, Artificial
  Synthesized antisense oligonucleotide
ccactttctacagaccctac

SEQ ID NO: 656 - DNA, 20 bp, Artificial
  Synthesized antisense oligonucleotide
tttctacagaccctacttca

SEQ ID NO: 657 - DNA, 20 bp, Artificial
  Synthesized antisense oligonucleotide
tacagaccctacttcagaat

SEQ ID NO: 658 - DNA, 20 bp, Artificial
  Synthesized antisense oligonucleotide
tacttcagaatcgtccgctt

SEQ ID NO: 659 - DNA, 20 bp, Artificial
  Synthesized antisense oligonucleotide
cacaaagacaggaacctggg

SEQ ID NO: 660 - DNA, 20 bp, Artificial
  Synthesized antisense oligonucleotide
taaaataagtttacactgcc

SEQ ID NO: 661 - DNA, 20 bp, Artificial
  Synthesized antisense oligonucleotide
tgcaggtattgatggcacct

SEQ ID NO: 662 - DNA, 20 bp, Artificial
  Synthesized antisense oligonucleotide
ccagtggtgatcagaaaact

SEQ ID NO: 663 - DNA, 20 bp, Artificial
  Synthesized antisense oligonucleotide
tggtgatcagaaaactataa

SEQ ID NO: 664 - DNA, 20 bp, Artificial
  Synthesized antisense oligonucleotide
cctgctaatgttgttgccct

SEQ ID NO: 665 - DNA, 20 bp, Artificial
  Synthesized antisense oligonucleotide
gccctcctacagactggagt

SEQ ID NO: 666 - DNA, 20 bp, Artificial
  Synthesized antisense oligonucleotide
tgctttagaaatgtgcagga

SEQ ID NO: 667 - DNA, 20 bp, Artificial
  Synthesized antisense oligonucleotide
tgccttcgccctctttacat

SEQ ID NO: 668 - DNA, 20 bp, Artificial
  Synthesized antisense oligonucleotide
gattttaagagggatcttgg

SEQ ID NO: 669 - DNA, 20 bp, Artificial
  Synthesized antisense oligonucleotide
tggatccatgaacccaaagg

SEQ ID NO: 670 - DNA, 20 bp, Artificial
  Synthesized antisense oligonucleotide
gaacccaaagggtacaatgc

SEQ ID NO: 671 - DNA, 20 bp, Artificial
  Synthesized antisense oligonucleotide
tacaatgctaacttctgtgc

SEQ ID NO: 672 - DNA, 20 bp, Artificial
  Synthesized antisense oligonucleotide
ccttgctgtgtgtcccagga

SEQ ID NO: 673 - DNA, 20 bp, Artificial
  Synthesized antisense oligonucleotide
gtcttgtaaatgcagctaaa

SEQ ID NO: 674 - DNA, 20 bp, Artificial
  Synthesized antisense oligonucleotide
aaatgcagctaaagtccttg

SEQ ID NO: 675 - DNA, 20 bp, Artificial
  Synthesized antisense oligonucleotide
aaaatcacggtgacaatgac

SEQ ID NO: 676 - DNA, 20 bp, Artificial
  Synthesized antisense oligonucleotide
gttctgtttgttaaaactgg

SEQ ID NO: 677 - DNA, 20 bp, Artificial
  Synthesized antisense oligonucleotide
gtttgttaaaactggcatct

SEQ ID NO: 678 - DNA, 20 bp, Artificial
  Synthesized antisense oligonucleotide
tgtgttactatataatgaac

SEQ ID NO: 679 - DNA, 20 bp, Artificial
  Synthesized antisense oligonucleotide
acctttcattacccttggaa

SEQ ID NO: 680 - DNA, 20 bp, Artificial
  Synthesized antisense oligonucleotide
aaactcatggatggcttaag

SEQ ID NO: 681 - DNA, 20 bp, Artificial
  Synthesized antisense oligonucleotide
aattgtaaatggttctttgc

SEQ ID NO: 682 - DNA, 20 bp, Artificial
  Synthesized antisense oligonucleotide
tctttgccagtttaagcaag

SEQ ID NO: 683 - DNA, 20 bp, Artificial
  Synthesized antisense oligonucleotide
acagtaactactttacatgt

SEQ ID NO: 684 - DNA, 20 bp, Artificial
  Synthesized antisense oligonucleotide
ctactttacatgtaatgtgt

SEQ ID NO: 685 - DNA, 20 bp, Artificial
  Synthesized antisense oligonucleotide
catgtaatgtgtagatctta

SEQ ID NO: 686 - DNA, 20 bp, Artificial
  Synthesized antisense oligonucleotide
gctggccagtacctttgaat

SEQ ID NO: 687 - DNA, 20 bp, Artificial
  Synthesized antisense oligonucleotide
ctttgcaggctgattaaaaa

SEQ ID NO: 688 - DNA, 20 bp, Artificial
  Synthesized antisense oligonucleotide
aactgtctgcccagttgtta

SEQ ID NO: 689 - DNA, 20 bp, Artificial
  Synthesized antisense oligonucleotide
tctgcccagttgttacaaca

SEQ ID NO: 690 - DNA, 20 bp, Artificial
  Synthesized antisense oligonucleotide
acagtcccaggtgctctgtg

SEQ ID NO: 691 - DNA, 20 bp, Artificial
  Synthesized antisense oligonucleotide
cccaggtgctctgtgggtac

SEQ ID NO: 692 - DNA, 20 bp, Artificial
  Synthesized antisense oligonucleotide
gtgctctgtgggtaccttga

SEQ ID NO: 693 - DNA, 20 bp, Artificial
  Synthesized antisense oligonucleotide
ctgtgggtaccttgatgcca

SEQ ID NO: 694 - DNA, 20 bp, Artificial
  Synthesized antisense oligonucleotide
taccttgatgccatcccgcc

SEQ ID NO: 695 - DNA, 20 bp, Artificial
  Synthesized antisense oligonucleotide
ttccaccattagcacgcggg

SEQ ID NO: 696 - DNA, 20 bp, Artificial
  Synthesized antisense oligonucleotide
ccgtgaccagatgcaggatc

SEQ ID NO: 697 - DNA, 21 bp, Artificial
  Synthesized antisense oligonucleotide
cccggagggcggcatggggga

SEQ ID NO: 698 - DNA, 18 bp, Artificial
  Synthesized antisense oligonucleotide
cctcagggagaagggcgc

SEQ ID NO: 699 - DNA, 18 bp, Artificial
  Synthesized antisense oligonucleotide
gtaggagggcctcgaggg

SEQ ID NO: 700 - DNA, 18 bp, Artificial
  Synthesized antisense oligonucleotide
ctgcaggggctgggggtc

SEQ ID NO: 701 - DNA, 18 bp, Artificial
  Synthesized antisense oligonucleotide
agggctggtgtggtgggg

SEQ ID NO: 702 - DNA, 18 bp, Artificial
  Synthesized antisense oligonucleotide
ggcatgggggaggcggcg

SEQ ID NO: 703 - DNA, 18 bp, Artificial
  Synthesized antisense oligonucleotide
ccggagggcggcatgggg

SEQ ID NO: 704 - DNA, 18 bp, Artificial
  Synthesized antisense oligonucleotide
ggggggctggcgagccgc

SEQ ID NO: 705 - DNA, 23 bp, Artificial
  Synthesized antisense oligonucleotide
ggacaggatctggccgcggatgg

SEQ ID NO: 706 - DNA, 18 bp, Artificial
  Synthesized antisense oligonucleotide
ccccctggctcggggggc

SEQ ID NO: 707 - DNA, 18 bp, Artificial
  Synthesized antisense oligonucleotide
gggccgggcggcacctcc

SEQ ID NO: 708 - DNA, 18 bp, Artificial
  Synthesized antisense oligonucleotide
gggcagcgggccgggcgg

SEQ ID NO: 709 - DNA, 18 bp, Artificial
  Synthesized antisense oligonucleotide
acggcctcgggcagcggg

SEQ ID NO: 710 - DNA, 18 bp, Artificial
  Synthesized antisense oligonucleotide
gggtgctgttgtacaggg

SEQ ID NO: 711 - DNA, 24 bp, Artificial
  Synthesized antisense oligonucleotide
gggtttccaccattagcacgcggg

SEQ ID NO: 712 - DNA, 14 bp, Artificial
  Synthesized antisense oligonucleotide
tcatagatttcgtt

SEQ ID NO: 713 - DNA, 13 bp, Artificial
  Synthesized antisense oligonucleotide
ttgtcatagattt

SEQ ID NO: 714 - DNA, 15 bp, Artificial
  Synthesized antisense oligonucleotide
aagaacatatatatg

SEQ ID NO: 715 - DNA, 14 bp, Artificial
  Synthesized antisense oligonucleotide
aagaacatatatat

SEQ ID NO: 716 - DNA, 16 bp, Artificial
  Synthesized antisense oligonucleotide
ttgaagaacatatata

SEQ ID NO: 717 - DNA, 18 bp, Artificial
  Synthesized antisense oligonucleotide
ccgggagagcaacacggg

SEQ ID NO: 718 - DNA, 13 bp, Artificial
  Synthesized antisense oligonucleotide
acttttaacttga

SEQ ID NO: 719 - DNA, 15 bp, Artificial
  Synthesized antisense oligonucleotide
attgttgctgtattt

SEQ ID NO: 720 - DNA, 14 bp, Artificial
  Synthesized antisense oligonucleotide
attgttgctgtatt

SEQ ID NO: 721 - DNA, 15 bp, Artificial
  Synthesized antisense oligonucleotide
aattgttgctgtatt

SEQ ID NO: 722 - DNA, 14 bp, Artificial
  Synthesized antisense oligonucleotide
aattgttgctgtat

SEQ ID NO: 723 - DNA, 27 bp, Artificial
  Synthesized antisense oligonucleotide
ggcgagtcgctgggtgccagcagccgg

SEQ ID NO: 724 - DNA, 14 bp, Artificial
  Synthesized antisense oligonucleotide
ggcgagtcgctggg

SEQ ID NO: 725 - DNA, 14 bp, Artificial
  Synthesized antisense oligonucleotide
acatcaaaagataa

SEQ ID NO: 726 - DNA, 14 bp, Artificial
  Synthesized antisense oligonucleotide
tgacatcaaaagat

SEQ ID NO: 727 - DNA, 18 bp, Artificial
  Synthesized antisense oligonucleotide
gggccctctccagcgggg

SEQ ID NO: 728 - DNA, 18 bp, Artificial
  Synthesized antisense oligonucleotide
gggctcggcggtgccggg

SEQ ID NO: 729 - DNA, 18 bp, Artificial
  Synthesized antisense oligonucleotide
ggggcagggcccgaggca

SEQ ID NO: 730 - DNA, 18 bp, Artificial
  Synthesized antisense oligonucleotide
ggctccaaatgtaggggc

SEQ ID NO: 731 - DNA, 24 bp, Artificial
  Synthesized antisense oligonucleotide
cgggttatgctggttgtacagggc

SEQ ID NO: 732 - DNA, 22 bp, Artificial
  Synthesized antisense oligonucleotide
cggcgccgccgaggcgcccggg

SEQ ID NO: 733 - DNA, 16 bp, Artificial
  Synthesized antisense oligonucleotide
ggggcggggcgggacc

SEQ ID NO: 734 - DNA, 18 bp, Artificial
  Synthesized antisense oligonucleotide
gggcggggcggggcgggg

SEQ ID NO: 735 - DNA, 18 bp, Artificial
  Synthesized antisense oligonucleotide
gggcggggtggggccggg

SEQ ID NO: 736 - DNA, 22 bp, Artificial
  Synthesized antisense oligonucleotide
gggcaaggcagcgggggcgggg

SEQ ID NO: 737 - DNA, 14 bp, Artificial
  Synthesized antisense oligonucleotide
cggtagcagcagcg

SEQ ID NO: 738 - DNA, 14 bp, Artificial
  Synthesized antisense oligonucleotide
ccagtagccacagc

SEQ ID NO: 739 - DNA, 15 bp, Artificial
  Synthesized antisense oligonucleotide
gcaggtggatagtcc

SEQ ID NO: 740 - DNA, 15 bp, Artificial
  Synthesized antisense oligonucleotide
cttgcaggtggatag

SEQ ID NO: 741 - DNA, 15 bp, Artificial
  Synthesized antisense oligonucleotide
cgatagtcttgcagg

SEQ ID NO: 742 - DNA, 18 bp, Artificial
  Synthesized antisense oligonucleotide
ccatgtcgatagtcttgc

SEQ ID NO: 743 - DNA, 15 bp, Artificial
  Synthesized antisense oligonucleotide
ctcgatgcgcttccg

SEQ ID NO: 744 - DNA, 15 bp, Artificial
  Synthesized antisense oligonucleotide
cctcgatgcgcttcc

SEQ ID NO: 745 - DNA, 15 bp, Artificial
  Synthesized antisense oligonucleotide
ggatggcctcgatgc

SEQ ID NO: 746 - DNA, 15 bp, Artificial
  Synthesized antisense oligonucleotide
ggacaggatctggcc

SEQ ID NO: 747 - DNA, 15 bp, Artificial
  Synthesized antisense oligonucleotide
cgcagcttggacagg

SEQ ID NO: 748 - DNA, 14 bp, Artificial
  Synthesized antisense oligonucleotide
gagccgcagcttgg

SEQ ID NO: 749 - DNA, 14 bp, Artificial
  Synthesized antisense oligonucleotide
cgagccgcagcttg

SEQ ID NO: 750 - DNA, 14 bp, Artificial
  Synthesized antisense oligonucleotide
acctccccctggct

SEQ ID NO: 751 - DNA, 14 bp, Artificial
  Synthesized antisense oligonucleotide
ccaccattagcacg

SEQ ID NO: 752 - DNA, 18 bp, Artificial
  Synthesized antisense oligonucleotide
gaacttgtcatagatttc

SEQ ID NO: 753 - DNA, 16 bp, Artificial
  Synthesized antisense oligonucleotide
gctgtgtgtactctgc

SEQ ID NO: 754 - DNA, 14 bp, Artificial
  Synthesized antisense oligonucleotide
gctccacgtgctgc

SEQ ID NO: 755 - DNA, 18 bp, Artificial
  Synthesized antisense oligonucleotide
gaattgttgctgtatttc

SEQ ID NO: 756 - DNA, 15 bp, Artificial
  Synthesized antisense oligonucleotide
gccaggaattgttgc

SEQ ID NO: 757 - DNA, 18 bp, Artificial
  Synthesized antisense oligonucleotide
gtgacatcaaaagataac

SEQ ID NO: 758 - DNA, 15 bp, Artificial
  Synthesized antisense oligonucleotide
ggctcaaccactgcc

SEQ ID NO: 759 - DNA, 14 bp, Artificial
  Synthesized antisense oligonucleotide
gctgtcacaggagc

SEQ ID NO: 760 - DNA, 14 bp, Artificial
  Synthesized antisense oligonucleotide
cctgctgtcacagg

SEQ ID NO: 761 - DNA, 18 bp, Artificial
  Synthesized antisense oligonucleotide
gcagtgtgttatccctgc

SEQ ID NO: 762 - DNA, 15 bp, Artificial
  Synthesized antisense oligonucleotide
gcagtgtgttatccc

SEQ ID NO: 763 - DNA, 14 bp, Artificial
  Synthesized antisense oligonucleotide
ccaggtcacctcgg

SEQ ID NO: 764 - DNA, 15 bp, Artificial
  Synthesized antisense oligonucleotide
gccatgaatggtggc

SEQ ID NO: 765 - DNA, 14 bp, Artificial
  Synthesized antisense oligonucleotide
gccatgaatggtgg

SEQ ID NO: 766 - DNA, 14 bp, Artificial
  Synthesized antisense oligonucleotide
ccatgagaagcagg

SEQ ID NO: 767 - DNA, 17 bp, Artificial
  Synthesized antisense oligonucleotide
ggaagtcaatgtacagc

SEQ ID NO: 768 - DNA, 18 bp, Artificial
  Synthesized antisense oligonucleotide
ccacgtagtacacgatgg

SEQ ID NO: 769 - DNA, 14 bp, Artificial
  Synthesized antisense oligonucleotide
gcacttgcaggagc

SEQ ID NO: 770 - DNA, 14 bp, Artificial
  Synthesized antisense oligonucleotide
ccatggcagtgacc

SEQ ID NO: 771 - DNA, 14 bp, Artificial
  Synthesized antisense oligonucleotide
ggctcctccatggc

SEQ ID NO: 772 - DNA, 16 bp, Artificial
  Synthesized antisense oligonucleotide
gctaggatctgactgc

SEQ ID NO: 773 - DNA, 14 bp, Artificial
  Synthesized antisense oligonucleotide
cctgactcagaggg

SEQ ID NO: 774 - DNA, 17 bp, Artificial
  Synthesized antisense oligonucleotide
ggtctgaaaatgtttcc

SEQ ID NO: 775 - DNA, 16 bp, Artificial
  Synthesized antisense oligonucleotide
ccattgcttgggacgg

SEQ ID NO: 776 - DNA, 14 bp, Artificial
  Synthesized antisense oligonucleotide
gcatcaaatcatcc

SEQ ID NO: 777 - DNA, 16 bp, Artificial
  Synthesized antisense oligonucleotide
ccattgttcaatatcg

SEQ ID NO: 778 - DNA, 15 bp, Artificial
  Synthesized antisense oligonucleotide
ggtcttcagtgaacc

SEQ ID NO: 779 - DNA, 17 bp, Artificial
  Synthesized antisense oligonucleotide
ggagcttcatctggacc

SEQ ID NO: 780 - DNA, 15 bp, Artificial
  Synthesized antisense oligonucleotide
cctctggcattctgg

SEQ ID NO: 781 - DNA, 14 bp, Artificial
  Synthesized antisense oligonucleotide
agggacagaagatg

SEQ ID NO: 782 - DNA, 14 bp, Artificial
  Synthesized antisense oligonucleotide
gttttctgggaagg

SEQ ID NO: 783 - DNA, 14 bp, Artificial
  Synthesized antisense oligonucleotide
ggttttctgggaag

SEQ ID NO: 784 - DNA, 15 bp, Artificial
  Synthesized antisense oligonucleotide
aggttttctgggaag

SEQ ID NO: 785 - DNA, 14 bp, Artificial
  Synthesized antisense oligonucleotide
gtaggttttctggg

SEQ ID NO: 786 - DNA, 14 bp, Artificial
  Synthesized antisense oligonucleotide
ggtaggttttctgg

SEQ ID NO: 787 - DNA, 17 bp, Artificial
  Synthesized antisense oligonucleotide
ccagaatgcaagaagcc

SEQ ID NO: 788 - DNA, 15 bp, Artificial
  Synthesized antisense oligonucleotide
gctgtcccagaatgc

SEQ ID NO: 789 - DNA, 18 bp, Artificial
  Synthesized antisense oligonucleotide
gcaagtcacagacttggc

SEQ ID NO: 790 - DNA, 15 bp, Artificial
  Synthesized antisense oligonucleotide
ccacagctgcacagg

SEQ ID NO: 791 - DNA, 15 bp, Artificial
  Synthesized antisense oligonucleotide
ggtgtggaatcaacc

SEQ ID NO: 792 - DNA, 14 bp, Artificial
  Synthesized antisense oligonucleotide
gtcatgtgctgtga

SEQ ID NO: 793 - DNA, 16 bp, Artificial
  Synthesized antisense oligonucleotide
cgctatctgagcagcg

SEQ ID NO: 794 - DNA, 15 bp, Artificial
  Synthesized antisense oligonucleotide
ccagtgtgatgatgg

SEQ ID NO: 795 - DNA, 18 bp, Artificial
  Synthesized antisense oligonucleotide
ccagtagattaccactgg

SEQ ID NO: 796 - DNA, 16 bp, Artificial
  Synthesized antisense oligonucleotide
ggcacaaacacgcacc

SEQ ID NO: 797 - DNA, 15 bp, Artificial
  Synthesized antisense oligonucleotide
ccacggatctgaagg

SEQ ID NO: 798 - DNA, 17 bp, Artificial
  Synthesized antisense oligonucleotide
cggaacatctcgaagcg

SEQ ID NO: 799 - DNA, 17 bp, Artificial
  Synthesized antisense oligonucleotide
cctcattcagctctcgg

SEQ ID NO: 800 - DNA, 15 bp, Artificial
  Synthesized antisense oligonucleotide
ccttgagttccaagg

SEQ ID NO: 801 - DNA, 17 bp, Artificial
  Synthesized antisense oligonucleotide
cctttttggacttcagg

SEQ ID NO: 802 - DNA, 16 bp, Artificial
  Synthesized antisense oligonucleotide
ggaggtagactgaccc

SEQ ID NO: 803 - DNA, 12 bp, Artificial
  Synthesized antisense oligonucleotide
aaaatgtttcct

SEQ ID NO: 804 - DNA, 12 bp, Artificial
  Synthesized antisense oligonucleotide
tgaaaatgtttc

SEQ ID NO: 805 - DNA, 12 bp, Artificial
  Synthesized antisense oligonucleotide
ctgaaaatgttt

SEQ ID NO: 806 - DNA, 13 bp, Artificial
  Synthesized antisense oligonucleotide
tctgaaaatgttt

SEQ ID NO: 807 - DNA, 12 bp, Artificial
  Synthesized antisense oligonucleotide
tctgaaaatgtt

SEQ ID NO: 808 - DNA, 12 bp, Artificial
  Synthesized antisense oligonucleotide
aaatcatccatt

SEQ ID NO: 809 - DNA, 12 bp, Artificial
  Synthesized antisense oligonucleotide
ttgttcaatatc

SEQ ID NO: 810 - DNA, 13 bp, Artificial
  Synthesized antisense oligonucleotide
attgttcaatatc

SEQ ID NO: 811 - DNA, 12 bp, Artificial
  Synthesized antisense oligonucleotide
attgttcaatat

SEQ ID NO: 812 - DNA, 13 bp, Artificial
  Synthesized antisense oligonucleotide
cattgttcaatat

SEQ ID NO: 813 - DNA, 12 bp, Artificial
  Synthesized antisense oligonucleotide
cattgttcaata

SEQ ID NO: 814 - DNA, 12 bp, Artificial
  Synthesized antisense oligonucleotide
aaaagtgtttct

SEQ ID NO: 815 - DNA, 15 bp, Artificial
  Synthesized antisense oligonucleotide
acatgagttttttat

SEQ ID NO: 816 - DNA, 16 bp, Artificial
  Synthesized antisense oligonucleotide
aacatgagttttttat

SEQ ID NO: 817 - DNA, 14 bp, Artificial
  Synthesized antisense oligonucleotide
acatgagtttttta

SEQ ID NO: 818 - DNA, 15 bp, Artificial
  Synthesized antisense oligonucleotide
aacatgagtttttta

SEQ ID NO: 819 - DNA, 14 bp, Artificial
  Synthesized antisense oligonucleotide
aacatgagtttttt

SEQ ID NO: 820 - DNA, 13 bp, Artificial
  Synthesized antisense oligonucleotide
aaaacatcttgtt

SEQ ID NO: 821 - DNA, 17 bp, Artificial
  Synthesized antisense oligonucleotide
cagagggggctcgacgc

SEQ ID NO: 822 - DNA, 18 bp, Artificial
  Synthesized antisense oligonucleotide
ctgactcagagggggctc

SEQ ID NO: 823 - DNA, 14 bp, Artificial
  Synthesized antisense oligonucleotide
agggggacagaacg

SEQ ID NO: 824 - DNA, 23 bp, Artificial
  Synthesized antisense oligonucleotide
ttgggacggcaagggggacagaa

SEQ ID NO: 825 - DNA, 17 bp, Artificial
  Synthesized antisense oligonucleotide
tgggacggcaaggggga

SEQ ID NO: 826 - DNA, 15 bp, Artificial
  Synthesized antisense oligonucleotide
gccacggggggagca

SEQ ID NO: 827 - DNA, 19 bp, Artificial
  Synthesized antisense oligonucleotide
gcaggggccacggggggag

SEQ ID NO: 828 - DNA, 14 bp, Artificial
  Synthesized antisense oligonucleotide
aggggccacggggg

SEQ ID NO: 829 - DNA, 14 bp, Artificial
  Synthesized antisense oligonucleotide
caggggccacgggg

SEQ ID NO: 830 - DNA, 15 bp, Artificial
  Synthesized antisense oligonucleotide
ggtgcaggggccacg

SEQ ID NO: 831 - DNA, 18 bp, Artificial
  Synthesized antisense oligonucleotide
tggtgcaggggccgccgg

SEQ ID NO: 832 - DNA, 18 bp, Artificial
  Synthesized antisense oligonucleotide
ggggctggtgcaggggcc

SEQ ID NO: 833 - DNA, 18 bp, Artificial
  Synthesized antisense oligonucleotide
agggggctggtgcagggg

SEQ ID NO: 834 - DNA, 14 bp, Artificial
  Synthesized antisense oligonucleotide
gggctggtgcaggg

SEQ ID NO: 835 - DNA, 16 bp, Artificial
  Synthesized antisense oligonucleotide
gagggggctggtgcag

SEQ ID NO: 836 - DNA, 15 bp, Artificial
  Synthesized antisense oligonucleotide
aggagggggctggtg

SEQ ID NO: 837 - DNA, 18 bp, Artificial
  Synthesized antisense oligonucleotide
gggccaggagggggctgg

SEQ ID NO: 838 - DNA, 18 bp, Artificial
  Synthesized antisense oligonucleotide
aggggccaggagggggct

SEQ ID NO: 839 - DNA, 14 bp, Artificial
  Synthesized antisense oligonucleotide
ggggccaggagggg

SEQ ID NO: 840 - DNA, 15 bp, Artificial
  Synthesized antisense oligonucleotide
caggggccaggaggg

SEQ ID NO: 841 - DNA, 16 bp, Artificial
  Synthesized antisense oligonucleotide
tctgggaagggacaga

SEQ ID NO: 842 - DNA, 16 bp, Artificial
  Synthesized antisense oligonucleotide
tgagggcaggggagta

SEQ ID NO: 843 - DNA, 15 bp, Artificial
  Synthesized antisense oligonucleotide
ttgagggcaggggag

SEQ ID NO: 844 - DNA, 19 bp, Artificial
  Synthesized antisense oligonucleotide
cgggtgccgggcgggggtg

SEQ ID NO: 845 - DNA, 24 bp, Artificial
  Synthesized antisense oligonucleotide
cggacgcgggtgccgggcgggggt

SEQ ID NO: 846 - DNA, 15 bp, Artificial
  Synthesized antisense oligonucleotide
cgggtgccgggcggg

SEQ ID NO: 847 - DNA, 18 bp, Artificial
  Synthesized antisense oligonucleotide
ggacgcgggtgccgggcg

SEQ ID NO: 848 - DNA, 18 bp, Artificial
  Synthesized antisense oligonucleotide
tgggggcagcgcctcaca

SEQ ID NO: 849 - DNA, 16 bp, Artificial
  Synthesized antisense oligonucleotide
ggtgggggcagcgcct

SEQ ID NO: 850 - DNA, 20 bp, Artificial
  Synthesized antisense oligonucleotide
ccattttagtgcacatccgg

SEQ ID NO: 851 - DNA, 18 bp, Artificial
  Synthesized antisense oligonucleotide
ccattttagtgcacatcc

SEQ ID NO: 852 - DNA, 18 bp, Artificial
  Synthesized antisense oligonucleotide
gctgttccattttagtgc

SEQ ID NO: 853 - DNA, 14 bp, Artificial
  Synthesized antisense oligonucleotide
gtagtcgtgtagag

SEQ ID NO: 854 - DNA, 16 bp, Artificial
  Synthesized antisense oligonucleotide
gtttgtagtcgtgtag

SEQ ID NO: 855 - DNA, 17 bp, Artificial
  Synthesized antisense oligonucleotide
gtttcaggagtttgtag

SEQ ID NO: 856 - DNA, 15 bp, Artificial
  Synthesized antisense oligonucleotide
ccagctccgaagagg

SEQ ID NO: 857 - DNA, 16 bp, Artificial
  Synthesized antisense oligonucleotide
cgtcgtcgtgatcacg

SEQ ID NO: 858 - DNA, 16 bp, Artificial
  Synthesized antisense oligonucleotide
ggtaaaagtactgtcc

SEQ ID NO: 859 - DNA, 15 bp, Artificial
  Synthesized antisense oligonucleotide
ggctttgacaaagcc

SEQ ID NO: 860 - DNA, 18 bp, Artificial
  Synthesized antisense oligonucleotide
cttgtgcagatcgtccag

SEQ ID NO: 861 - DNA, 17 bp, Artificial
  Synthesized antisense oligonucleotide
cgtggttcatcttgtgc

SEQ ID NO: 862 - DNA, 18 bp, Artificial
  Synthesized antisense oligonucleotide
cacgtggttcatcttgtg

SEQ ID NO: 863 - DNA, 15 bp, Artificial
  Synthesized antisense oligonucleotide
cctccttgaaggtgg

SEQ ID NO: 864 - DNA, 17 bp, Artificial
  Synthesized antisense oligonucleotide
cgctccactttgatgcg

SEQ ID NO: 865 - DNA, 14 bp, Artificial
  Synthesized antisense oligonucleotide
ccttgtcctccagg

SEQ ID NO: 866 - DNA, 14 bp, Artificial
  Synthesized antisense oligonucleotide
ggtactcgacagcc

SEQ ID NO: 867 - DNA, 15 bp, Artificial
  Synthesized antisense oligonucleotide
ctgacgtgggtcatg

SEQ ID NO: 868 - DNA, 15 bp, Artificial
  Synthesized antisense oligonucleotide
ccgttgctgacgtgg

SEQ ID NO: 869 - DNA, 14 bp, Artificial
  Synthesized antisense oligonucleotide
catcctccgcctcc

SEQ ID NO: 870 - DNA, 14 bp, Artificial
  Synthesized antisense oligonucleotide
gtttccatcctccg

SEQ ID NO: 871 - DNA, 16 bp, Artificial
  Synthesized antisense oligonucleotide
ggtgtttccatcctcc

SEQ ID NO: 872 - DNA, 15 bp, Artificial
  Synthesized antisense oligonucleotide
ggtgtttccatcctc

SEQ ID NO: 873 - DNA, 15 bp, Artificial
  Synthesized antisense oligonucleotide
gctcagcgcctcatc

SEQ ID NO: 874 - DNA, 18 bp, Artificial
  Synthesized antisense oligonucleotide
ccttcttcatcatgctgc

SEQ ID NO: 875 - DNA, 17 bp, Artificial
  Synthesized antisense oligonucleotide
ccttcttcatcatgctg

SEQ ID NO: 876 - DNA, 15 bp, Artificial
  Synthesized antisense oligonucleotide
ccttcttcatcatgc

SEQ ID NO: 877 - DNA, 19 bp, Artificial
  Synthesized antisense oligonucleotide
gcgtccttcttcatcatgc

SEQ ID NO: 878 - DNA, 14 bp, Artificial
  Synthesized antisense oligonucleotide
cctgctcactcagg

SEQ ID NO: 879 - DNA, 14 bp, Artificial
  Synthesized antisense oligonucleotide
cgcaggcttgagcg

SEQ ID NO: 880 - DNA, 15 bp, Artificial
  Synthesized antisense oligonucleotide
gccagcttcagcagc

SEQ ID NO: 881 - DNA, 14 bp, Artificial
  Synthesized antisense oligonucleotide
ggtggtgaccagcc

SEQ ID NO: 882 - DNA, 14 bp, Artificial
  Synthesized antisense oligonucleotide
cctcggcgaactcc

SEQ ID NO: 883 - DNA, 14 bp, Artificial
  Synthesized antisense oligonucleotide
gcttgtgtaaatcc

SEQ ID NO: 884 - DNA, 20 bp, Artificial
  Synthesized antisense oligonucleotide
ggttctgcttgtgtaaatcc

SEQ ID NO: 885 - DNA, 15 bp, Artificial
  Synthesized antisense oligonucleotide
gctgctcaggttcgc

SEQ ID NO: 886 - DNA, 14 bp, Artificial
  Synthesized antisense oligonucleotide
gaaggcgaccgtcg

SEQ ID NO: 887 - DNA, 14 bp, Artificial
  Synthesized antisense oligonucleotide
cgaaggcgaccgtc

SEQ ID NO: 888 - DNA, 14 bp, Artificial
  Synthesized antisense oligonucleotide
gcaccgtctgtggc

SEQ ID NO: 889 - DNA, 17 bp, Artificial
  Synthesized antisense oligonucleotide
cgtgtccatgtcgatgg

SEQ ID NO: 890 - DNA, 16 bp, Artificial
  Synthesized antisense oligonucleotide
cgtgtccatgtcgatg

SEQ ID NO: 891 - DNA, 14 bp, Artificial
  Synthesized antisense oligonucleotide
gcgtgtccatgtcg

SEQ ID NO: 892 - DNA, 15 bp, Artificial
  Synthesized antisense oligonucleotide
ccagcttgcgcttgc

SEQ ID NO: 893 - DNA, 14 bp, Artificial
  Synthesized antisense oligonucleotide
cgctccagcttgcg

SEQ ID NO: 894 - DNA, 18 bp, Artificial
  Synthesized antisense oligonucleotide
cgtgttctgactcttgag

SEQ ID NO: 895 - DNA, 16 bp, Artificial
  Synthesized antisense oligonucleotide
cgtgttctgactcttg

SEQ ID NO: 896 - DNA, 14 bp, Artificial
  Synthesized antisense oligonucleotide
gctgttgacgtggc

SEQ ID NO: 897 - DNA, 14 bp, Artificial
  Synthesized antisense oligonucleotide
cgactcagtacgcc

SEQ ID NO: 898 - DNA, 14 bp, Artificial
  Synthesized antisense oligonucleotide
gccatgcccgactc

SEQ ID NO: 899 - DNA, 14 bp, Artificial
  Synthesized antisense oligonucleotide
cccttggaggtggc

SEQ ID NO: 900 - DNA, 13 bp, Artificial
  Synthesized antisense oligonucleotide
ttttagtgcacat

SEQ ID NO: 901 - DNA, 14 bp, Artificial
  Synthesized antisense oligonucleotide
tgttccattttagt

SEQ ID NO: 902 - DNA, 14 bp, Artificial
  Synthesized antisense oligonucleotide
aaaaaaagtggaag

SEQ ID NO: 903 - DNA, 14 bp, Artificial
  Synthesized antisense oligonucleotide
tacaaaaaaaagtg

SEQ ID NO: 904 - DNA, 14 bp, Artificial
  Synthesized antisense oligonucleotide
atacaaaaaaaagt

SEQ ID NO: 905 - DNA, 15 bp, Artificial
  Synthesized antisense oligonucleotide
catacaaaaaaaagt

SEQ ID NO: 906 - DNA, 14 bp, Artificial
  Synthesized antisense oligonucleotide
catacaaaaaaaag

SEQ ID NO: 907 - DNA, 14 bp, Artificial
  Synthesized antisense oligonucleotide
gaaaaaaaacatac

SEQ ID NO: 908 - DNA, 16 bp, Artificial
  Synthesized antisense oligonucleotide
cagaaaaaaaacatac

SEQ ID NO: 909 - DNA, 14 bp, Artificial
  Synthesized antisense oligonucleotide
cagaaaaaaaacat

SEQ ID NO: 910 - DNA, 14 bp, Artificial
  Synthesized antisense oligonucleotide
ttcaatatgaatcg

SEQ ID NO: 911 - DNA, 16 bp, Artificial
  Synthesized antisense oligonucleotide
tattcaatatgaatcg

SEQ ID NO: 912 - DNA, 15 bp, Artificial
  Synthesized antisense oligonucleotide
tattcaatatgaatc

SEQ ID NO: 913 - DNA, 14 bp, Artificial
  Synthesized antisense oligonucleotide
tattcaatatgaat

SEQ ID NO: 914 - DNA, 15 bp, Artificial
  Synthesized antisense oligonucleotide
tatattcaatatgaa

SEQ ID NO: 915 - DNA, 15 bp, Artificial
  Synthesized antisense oligonucleotide
ttatattcaatatga

SEQ ID NO: 916 - DNA, 17 bp, Artificial
  Synthesized antisense oligonucleotide
tattatattcaatatga

SEQ ID NO: 917 - DNA, 14 bp, Artificial
  Synthesized antisense oligonucleotide
ttatattcaatatg

SEQ ID NO: 918 - DNA, 16 bp, Artificial
  Synthesized antisense oligonucleotide
tattatattcaatatg

SEQ ID NO: 919 - DNA, 14 bp, Artificial
  Synthesized antisense oligonucleotide
attatattcaatat

SEQ ID NO: 920 - DNA, 15 bp, Artificial
  Synthesized antisense oligonucleotide
tattatattcaatat

SEQ ID NO: 921 - DNA, 18 bp, Artificial
  Synthesized antisense oligonucleotide
atatattatattcaatat

SEQ ID NO: 922 - DNA, 20 bp, Artificial
  Synthesized antisense oligonucleotide
aaatatattatattcaatat

SEQ ID NO: 923 - DNA, 14 bp, Artificial
  Synthesized antisense oligonucleotide
tattatattcaata

SEQ ID NO: 924 - DNA, 17 bp, Artificial
  Synthesized antisense oligonucleotide
atatattatattcaata

SEQ ID NO: 925 - DNA, 20 bp, Artificial
  Synthesized antisense oligonucleotide
caaatatattatattcaata

SEQ ID NO: 926 - DNA, 15 bp, Artificial
  Synthesized antisense oligonucleotide
tatattatattcaat

SEQ ID NO: 927 - DNA, 17 bp, Artificial
  Synthesized antisense oligonucleotide
aatatattatattcaat

SEQ ID NO: 928 - DNA, 14 bp, Artificial
  Synthesized antisense oligonucleotide
tatattatattcaa

SEQ ID NO: 929 - DNA, 18 bp, Artificial
  Synthesized antisense oligonucleotide
caaatatattatattcaa

SEQ ID NO: 930 - DNA, 17 bp, Artificial
  Synthesized antisense oligonucleotide
caaatatattatattca

SEQ ID NO: 931 - DNA, 16 bp, Artificial
  Synthesized antisense oligonucleotide
caaatatattatattc

SEQ ID NO: 932 - DNA, 18 bp, Artificial
  Synthesized antisense oligonucleotide
cacaaatatattatattc

SEQ ID NO: 933 - DNA, 14 bp, Artificial
  Synthesized antisense oligonucleotide
aaatatattatatt

SEQ ID NO: 934 - DNA, 15 bp, Artificial
  Synthesized antisense oligonucleotide
caaatatattatatt

SEQ ID NO: 935 - DNA, 14 bp, Artificial
  Synthesized antisense oligonucleotide
caaatatattatat

SEQ ID NO: 936 - DNA, 16 bp, Artificial
  Synthesized antisense oligonucleotide
cacaaatatattatat

SEQ ID NO: 937 - DNA, 14 bp, Artificial
  Synthesized antisense oligonucleotide
cacaaatatattat

SEQ ID NO: 938 - DNA, 16 bp, Artificial
  Synthesized antisense oligonucleotide
tacacaaatatattat

SEQ ID NO: 939 - DNA, 15 bp, Artificial
  Synthesized antisense oligonucleotide
tacacaaatatatta

SEQ ID NO: 940 - DNA, 18 bp, Artificial
  Synthesized antisense oligonucleotide
taaatacacaaatatatt

SEQ ID NO: 941 - DNA, 14 bp, Artificial
  Synthesized antisense oligonucleotide
aatacacaaatata

SEQ ID NO: 942 - DNA, 16 bp, Artificial
  Synthesized antisense oligonucleotide
gttaaatacacaaata

SEQ ID NO: 943 - DNA, 14 bp, Artificial
  Synthesized antisense oligonucleotide
tgttaaatacacaa

SEQ ID NO: 944 - DNA, 14 bp, Artificial
  Synthesized antisense oligonucleotide
tttagagactaagt

SEQ ID NO: 945 - DNA, 14 bp, Artificial
  Synthesized antisense oligonucleotide
ataaactctttaga

SEQ ID NO: 946 - DNA, 17 bp, Artificial
  Synthesized antisense oligonucleotide
taaaataaactctttag

SEQ ID NO: 947 - DNA, 16 bp, Artificial
  Synthesized antisense oligonucleotide
taaaataaactcttta

SEQ ID NO: 948 - DNA, 16 bp, Artificial
  Synthesized antisense oligonucleotide
ttaaaataaactcttt

SEQ ID NO: 949 - DNA, 14 bp, Artificial
  Synthesized antisense oligonucleotide
cttaaaataaactc

SEQ ID NO: 950 - DNA, 15 bp, Artificial
  Synthesized antisense oligonucleotide
taaaaagaacaaaca

SEQ ID NO: 951 - DNA, 14 bp, Artificial
  Synthesized antisense oligonucleotide
taaaaagaacaaac

SEQ ID NO: 952 - DNA, 15 bp, Artificial
  Synthesized antisense oligonucleotide
caataaaaagaacaa

SEQ ID NO: 953 - DNA, 16 bp, Artificial
  Synthesized antisense oligonucleotide
tcaataaaaagaacaa

SEQ ID NO: 954 - DNA, 14 bp, Artificial
  Synthesized antisense oligonucleotide
tcaataaaaagaac

SEQ ID NO: 955 - DNA, 14 bp, Artificial
  Synthesized antisense oligonucleotide
ttcaataaaaagaa

SEQ ID NO: 956 - DNA, 17 bp, Artificial
  Synthesized antisense oligonucleotide
tagattcaataaaaaga

SEQ ID NO: 957 - DNA, 17 bp, Artificial
  Synthesized antisense oligonucleotide
tggcgcgggcgggtagc

SEQ ID NO: 958 - DNA, 20 bp, Artificial
  Synthesized antisense oligonucleotide
gggctggcgcgggcgggtag

SEQ ID NO: 959 - DNA, 21 bp, Artificial
  Synthesized antisense oligonucleotide
tcgggggctggcgcgggcggg

SEQ ID NO: 960 - DNA, 26 bp, Artificial
  Synthesized antisense oligonucleotide
tgggtgcctggtcgcgcgttctcggg

SEQ ID NO: 961 - DNA, 18 bp, Artificial
  Synthesized antisense oligonucleotide
agggtccctgcggggccg

SEQ ID NO: 962 - DNA, 18 bp, Artificial
  Synthesized antisense oligonucleotide
gggagggtccctgcgggg

SEQ ID NO: 963 - DNA, 16 bp, Artificial
  Synthesized antisense oligonucleotide
gggagggtccctgcgg

SEQ ID NO: 964 - DNA, 14 bp, Artificial
  Synthesized antisense oligonucleotide
tgggccgggtccgc

SEQ ID NO: 965 - DNA, 14 bp, Artificial
  Synthesized antisense oligonucleotide
tcccgggggtgtag

SEQ ID NO: 966 - DNA, 19 bp, Artificial
  Synthesized antisense oligonucleotide
agtactgtcccgggggtgt

SEQ ID NO: 967 - DNA, 18 bp, Artificial
  Synthesized antisense oligonucleotide
gggacacgttggggggtg

SEQ ID NO: 968 - DNA, 20 bp, Artificial
  Synthesized antisense oligonucleotide
gccgggggccccccggtagc

SEQ ID NO: 969 - DNA, 17 bp, Artificial
  Synthesized antisense oligonucleotide
cgggcccagccgggggc

SEQ ID NO: 970 - DNA, 14 bp, Artificial
  Synthesized antisense oligonucleotide
cgggcccagccggg

SEQ ID NO: 971 - DNA, 20 bp, Artificial
  Synthesized antisense oligonucleotide
gggaggtggctccgggccgg

SEQ ID NO: 972 - DNA, 18 bp, Artificial
  Synthesized antisense oligonucleotide
agggcggcgcgtgtggga

SEQ ID NO: 973 - DNA, 20 bp, Artificial
  Synthesized antisense oligonucleotide
gggtggccaccggcgaaggg

SEQ ID NO: 974 - DNA, 15 bp, Artificial
  Synthesized antisense oligonucleotide
aggggcaggggacgt

SEQ ID NO: 975 - DNA, 18 bp, Artificial
  Synthesized antisense oligonucleotide
taaaggggcaggggacgt

SEQ ID NO: 976 - DNA, 20 bp, Artificial
  Synthesized antisense oligonucleotide
agggggtgtccgtaaagggg

SEQ ID NO: 977 - DNA, 21 bp, Artificial
  Synthesized antisense oligonucleotide
ggggacgcgaacgtgccgccg

SEQ ID NO: 978 - DNA, 21 bp, Artificial
  Synthesized antisense oligonucleotide
cggggaacaagcggcccgggg

SEQ ID NO: 979 - DNA, 14 bp, Artificial
  Synthesized antisense oligonucleotide
ggccgtcgggggcg

SEQ ID NO: 980 - DNA, 15 bp, Artificial
  Synthesized antisense oligonucleotide
gcggccgtcgggggc

SEQ ID NO: 981 - DNA, 18 bp, Artificial
  Synthesized antisense oligonucleotide
aggggggtaggaggcggg

SEQ ID NO: 982 - DNA, 14 bp, Artificial
  Synthesized antisense oligonucleotide
gcgctgggggcgcc

SEQ ID NO: 983 - DNA, 14 bp, Artificial
  Synthesized antisense oligonucleotide
ggccgtcggggggt

SEQ ID NO: 984 - DNA, 15 bp, Artificial
  Synthesized antisense oligonucleotide
ggggaggccagcttc

SEQ ID NO: 985 - DNA, 16 bp, Artificial
  Synthesized antisense oligonucleotide
ggccgccaccttgggg

SEQ ID NO: 986 - DNA, 16 bp, Artificial
  Synthesized antisense oligonucleotide
gcggccgccgccgggg

SEQ ID NO: 987 - DNA, 20 bp, Artificial
  Synthesized antisense oligonucleotide
gggcgcggccgccgccgggg

SEQ ID NO: 988 - DNA, 16 bp, Artificial
  Synthesized antisense oligonucleotide
ggggtggcggcggcgg

SEQ ID NO: 989 - DNA, 15 bp, Artificial
  Synthesized antisense oligonucleotide
gggggtggcggcggc

SEQ ID NO: 990 - DNA, 18 bp, Artificial
  Synthesized antisense oligonucleotide
tggggcagcagctggcag

SEQ ID NO: 991 - DNA, 18 bp, Artificial
  Synthesized antisense oligonucleotide
cggggcgcccacgacacc

SEQ ID NO: 992 - DNA, 17 bp, Artificial
  Synthesized antisense oligonucleotide
cggggcgcccacgacac

SEQ ID NO: 993 - DNA, 26 bp, Artificial
  Synthesized antisense oligonucleotide
gggccgcaccctctccaagtccgggg

SEQ ID NO: 994 - DNA, 14 bp, Artificial
  Synthesized antisense oligonucleotide
gcagcagtcagtgg

SEQ ID NO: 995 - DNA, 16 bp, Artificial
  Synthesized antisense oligonucleotide
ccattgtctagcacgg

SEQ ID NO: 996 - DNA, 17 bp, Artificial
  Synthesized antisense oligonucleotide
ggtctccattgtctagc

SEQ ID NO: 997 - DNA, 16 bp, Artificial
  Synthesized antisense oligonucleotide
ggtggtattgttcagc

SEQ ID NO: 998 - DNA, 15 bp, Artificial
  Synthesized antisense oligonucleotide
gctggatcaagaccc

SEQ ID NO: 999 - DNA, 16 bp, Artificial
  Synthesized antisense oligonucleotide
ccacaaaatcgtgtcc

SEQ ID NO: 1000 - DNA, 20 bp, Artificial
  Synthesized antisense oligonucleotide
ccttccacaaaatcgtgtcc

SEQ ID NO: 1001 - DNA, 14 bp, Artificial
  Synthesized antisense oligonucleotide
ggttgttcttgtgg

SEQ ID NO: 1002 - DNA, 14 bp, Artificial
  Synthesized antisense oligonucleotide
cctcttggttgtgc

SEQ ID NO: 1003 - DNA, 20 bp, Artificial
  Synthesized antisense oligonucleotide
ccagagtctcaaacacttgg

SEQ ID NO: 1004 - DNA, 20 bp, Artificial
  Synthesized antisense oligonucleotide
ggtaacctgtgatctcttcc

SEQ ID NO: 1005 - DNA, 14 bp, Artificial
  Synthesized antisense oligonucleotide
cctgcagtactcgg

SEQ ID NO: 1006 - DNA, 16 bp, Artificial
  Synthesized antisense oligonucleotide
ggcattcacatactcc

SEQ ID NO: 1007 - DNA, 16 bp, Artificial
  Synthesized antisense oligonucleotide
gcaaacagtgcctggc

SEQ ID NO: 1008 - DNA, 17 bp, Artificial
  Synthesized antisense oligonucleotide
cgcatcgtgtacttccg

SEQ ID NO: 1009 - DNA, 14 bp, Artificial
  Synthesized antisense oligonucleotide
gcacgttccgagcg

SEQ ID NO: 1010 - DNA, 15 bp, Artificial
  Synthesized antisense oligonucleotide
ggtaccagatactcc

SEQ ID NO: 1011 - DNA, 15 bp, Artificial
  Synthesized antisense oligonucleotide
ccagtggagacctgg

SEQ ID NO: 1012 - DNA, 17 bp, Artificial
  Synthesized antisense oligonucleotide
cctgaggacacatcagg

SEQ ID NO: 1013 - DNA, 18 bp, Artificial
  Synthesized antisense oligonucleotide
cctcacttggttgtgagc

SEQ ID NO: 1014 - DNA, 15 bp, Artificial
  Synthesized antisense oligonucleotide
ggaagatgtccttcc

SEQ ID NO: 1015 - DNA, 16 bp, Artificial
  Synthesized antisense oligonucleotide
gcacactgctcatggc

SEQ ID NO: 1016 - DNA, 15 bp, Artificial
  Synthesized antisense oligonucleotide
gctgtcacctcttgg

SEQ ID NO: 1017 - DNA, 14 bp, Artificial
  Synthesized antisense oligonucleotide
cctctgctgtcacc

SEQ ID NO: 1018 - DNA, 16 bp, Artificial
  Synthesized antisense oligonucleotide
ccacacatcactctgg

SEQ ID NO: 1019 - DNA, 15 bp, Artificial
  Synthesized antisense oligonucleotide
cctcctcttcagagg

SEQ ID NO: 1020 - DNA, 18 bp, Artificial
  Synthesized antisense oligonucleotide
ccttctggttcacactgg

SEQ ID NO: 1021 - DNA, 16 bp, Artificial
  Synthesized antisense oligonucleotide
catggtgctcactgcg

SEQ ID NO: 1022 - DNA, 14 bp, Artificial
  Synthesized antisense oligonucleotide
cttggttgtgagcg

SEQ ID NO: 1023 - DNA, 14 bp, Artificial
  Synthesized antisense oligonucleotide
ggacaggcagtcac

SEQ ID NO: 1024 - DNA, 18 bp, Artificial
  Synthesized antisense oligonucleotide
gtcacctcttggttgtgc

SEQ ID NO: 1025 - DNA, 16 bp, Artificial
  Synthesized antisense oligonucleotide
ccagagtctcaaacac

SEQ ID NO: 1026 - DNA, 14 bp, Artificial
  Synthesized antisense oligonucleotide
cacatactccctgg

SEQ ID NO: 1027 - DNA, 15 bp, Artificial
  Synthesized antisense oligonucleotide
gaccagcacgttccg

SEQ ID NO: 1028 - DNA, 17 bp, Artificial
  Synthesized antisense oligonucleotide
gttggtgtctatcagtg

SEQ ID NO: 1029 - DNA, 14 bp, Artificial
  Synthesized antisense oligonucleotide
ccctggtagaggtg

SEQ ID NO: 1030 - DNA, 16 bp, Artificial
  Synthesized antisense oligonucleotide
ctcaaacacttggagc

SEQ ID NO: 1031 - DNA, 18 bp, Artificial
  Synthesized antisense oligonucleotide
cacacatcactctggtgg

SEQ ID NO: 1032 - DNA, 15 bp, Artificial
  Synthesized antisense oligonucleotide
gcacagacagtgcgc

SEQ ID NO: 1033 - DNA, 15 bp, Artificial
  Synthesized antisense oligonucleotide
catggcagcagtcag

SEQ ID NO: 1034 - DNA, 16 bp, Artificial
  Synthesized antisense oligonucleotide
ctgctcatggcagcag

SEQ ID NO: 1035 - DNA, 20 bp, Artificial
  Synthesized antisense oligonucleotide
catctggaaacttccagatg

SEQ ID NO: 1036 - DNA, 14 bp, Artificial
  Synthesized antisense oligonucleotide
ctggaaacttccag

SEQ ID NO: 1037 - DNA, 20 bp, Artificial
  Synthesized antisense oligonucleotide
cataactccacacatcactc

SEQ ID NO: 1038 - DNA, 19 bp, Artificial
  Synthesized antisense oligonucleotide
caccataactccacacatc

SEQ ID NO: 1039 - DNA, 14 bp, Artificial
  Synthesized antisense oligonucleotide
ctggtgggtgaacc

SEQ ID NO: 1040 - DNA, 15 bp, Artificial
  Synthesized antisense oligonucleotide
cggattacttgcagg

SEQ ID NO: 1041 - DNA, 15 bp, Artificial
  Synthesized antisense oligonucleotide
cgctaggtgtcagcg

SEQ ID NO: 1042 - DNA, 14 bp, Artificial
  Synthesized antisense oligonucleotide
gccatcacgtatgc

SEQ ID NO: 1043 - DNA, 17 bp, Artificial
  Synthesized antisense oligonucleotide
gcatacaccagttcagc

SEQ ID NO: 1044 - DNA, 16 bp, Artificial
  Synthesized antisense oligonucleotide
ccatcaaatacatcgg

SEQ ID NO: 1045 - DNA, 15 bp, Artificial
  Synthesized antisense oligonucleotide
ccagcagaagtcagg

SEQ ID NO: 1046 - DNA, 15 bp, Artificial
  Synthesized antisense oligonucleotide
gcttcatgtctgtgc

SEQ ID NO: 1047 - DNA, 18 bp, Artificial
  Synthesized antisense oligonucleotide
ggtgagttccaggtttcc

SEQ ID NO: 1048 - DNA, 19 bp, Artificial
  Synthesized antisense oligonucleotide
ccacaaaatcgtgtcctgg

SEQ ID NO: 1049 - DNA, 14 bp, Artificial
  Synthesized antisense oligonucleotide
cccttacacatcgg

SEQ ID NO: 1050 - DNA, 15 bp, Artificial
  Synthesized antisense oligonucleotide
gcagctcacagatgc

SEQ ID NO: 1051 - DNA, 14 bp, Artificial
  Synthesized antisense oligonucleotide
gcactggtaactgc

SEQ ID NO: 1052 - DNA, 18 bp, Artificial
  Synthesized antisense oligonucleotide
cctggatattggcactgg

SEQ ID NO: 1053 - DNA, 15 bp, Artificial
  Synthesized antisense oligonucleotide
ccagcaaactcctgg

SEQ ID NO: 1054 - DNA, 15 bp, Artificial
  Synthesized antisense oligonucleotide
gcagaaatgccaggc

SEQ ID NO: 1055 - DNA, 17 bp, Artificial
  Synthesized antisense oligonucleotide
ccattgtgcagaattcg

SEQ ID NO: 1056 - DNA, 15 bp, Artificial
  Synthesized antisense oligonucleotide
ccctgcagtactcgg

SEQ ID NO: 1057 - DNA, 17 bp, Artificial
  Synthesized antisense oligonucleotide
ggcattcacatactccc

SEQ ID NO: 1058 - DNA, 16 bp, Artificial
  Synthesized antisense oligonucleotide
ggtcaggtttcacacc

SEQ ID NO: 1059 - DNA, 15 bp, Artificial
  Synthesized antisense oligonucleotide
ccaggtccacacagg

SEQ ID NO: 1060 - DNA, 14 bp, Artificial
  Synthesized antisense oligonucleotide
ccttgtcatccagg

SEQ ID NO: 1061 - DNA, 14 bp, Artificial
  Synthesized antisense oligonucleotide
ggatcccaaagacc

SEQ ID NO: 1062 - DNA, 17 bp, Artificial
  Synthesized antisense oligonucleotide
cctcaacactttgatgg

SEQ ID NO: 1063 - DNA, 14 bp, Artificial
  Synthesized antisense oligonucleotide
gctgtgtcaccagc

SEQ ID NO: 1064 - DNA, 16 bp, Artificial
  Synthesized antisense oligonucleotide
ggtctaagaggcagcc

SEQ ID NO: 1065 - DNA, 17 bp, Artificial
  Synthesized antisense oligonucleotide
ggcaatctgcatacacc

SEQ ID NO: 1066 - DNA, 14 bp, Artificial
  Synthesized antisense oligonucleotide
cctgtgtacgagcc

SEQ ID NO: 1067 - DNA, 15 bp, Artificial
  Synthesized antisense oligonucleotide
ccatccacttgatgg

SEQ ID NO: 1068 - DNA, 16 bp, Artificial
  Synthesized antisense oligonucleotide
cccacacagtcacacc

SEQ ID NO: 1069 - DNA, 16 bp, Artificial
  Synthesized antisense oligonucleotide
ccatcgtaaggtttgg

SEQ ID NO: 1070 - DNA, 14 bp, Artificial
  Synthesized antisense oligonucleotide
ccttttccagcagg

SEQ ID NO: 1071 - DNA, 16 bp, Artificial
  Synthesized antisense oligonucleotide
ggagaattcagacacc

SEQ ID NO: 1072 - DNA, 17 bp, Artificial
  Synthesized antisense oligonucleotide
ccaagtcctcattctgg

SEQ ID NO: 1073 - DNA, 16 bp, Artificial
  Synthesized antisense oligonucleotide
ccatcagtctcagagg

SEQ ID NO: 1074 - DNA, 16 bp, Artificial
  Synthesized antisense oligonucleotide
cctttgaaggtgctgg

SEQ ID NO: 1075 - DNA, 15 bp, Artificial
  Synthesized antisense oligonucleotide
ggcatggcaggttcc

SEQ ID NO: 1076 - DNA, 14 bp, Artificial
  Synthesized antisense oligonucleotide
cctggcatggcagg

SEQ ID NO: 1077 - DNA, 14 bp, Artificial
  Synthesized antisense oligonucleotide
agatgtataggtaa

SEQ ID NO: 1078 - DNA, 14 bp, Artificial
  Synthesized antisense oligonucleotide
attttcacattctc

SEQ ID NO: 1079 - DNA, 15 bp, Artificial
  Synthesized antisense oligonucleotide
aattttcacattctc

SEQ ID NO: 1080 - DNA, 14 bp, Artificial
  Synthesized antisense oligonucleotide
aattttcacattct

SEQ ID NO: 1081 - DNA, 14 bp, Artificial
  Synthesized antisense oligonucleotide
gaattttcacattc

SEQ ID NO: 1082 - DNA, 14 bp, Artificial
  Synthesized antisense oligonucleotide
ggaattttcacatt

SEQ ID NO: 1083 - DNA, 14 bp, Artificial
  Synthesized antisense oligonucleotide
agatttctttgttg

SEQ ID NO: 1084 - DNA, 15 bp, Artificial
  Synthesized antisense oligonucleotide
aagatttctttgttg

SEQ ID NO: 1085 - DNA, 14 bp, Artificial
  Synthesized antisense oligonucleotide
aagatttctttgtt

SEQ ID NO: 1086 - DNA, 15 bp, Artificial
  Synthesized antisense oligonucleotide
taagatttctttgtt

SEQ ID NO: 1087 - DNA, 16 bp, Artificial
  Synthesized antisense oligonucleotide
ctaagatttctttgtt

SEQ ID NO: 1088 - DNA, 14 bp, Artificial
  Synthesized antisense oligonucleotide
taagatttctttgt

SEQ ID NO: 1089 - DNA, 15 bp, Artificial
  Synthesized antisense oligonucleotide
ctaagatttctttgt

SEQ ID NO: 1090 - DNA, 14 bp, Artificial
  Synthesized antisense oligonucleotide
ctaagatttctttg

SEQ ID NO: 1091 - DNA, 14 bp, Artificial
  Synthesized antisense oligonucleotide
tctaagatttcttt

SEQ ID NO: 1092 - DNA, 15 bp, Artificial
  Synthesized antisense oligonucleotide
gtctaagatttcttt

SEQ ID NO: 1093 - DNA, 14 bp, Artificial
  Synthesized antisense oligonucleotide
gtctaagatttctt

SEQ ID NO: 1094 - DNA, 14 bp, Artificial
  Synthesized antisense oligonucleotide
ttcgtctaagattt

SEQ ID NO: 1095 - DNA, 14 bp, Artificial
  Synthesized antisense oligonucleotide
attttgacatggtt

SEQ ID NO: 1096 - DNA, 15 bp, Artificial
  Synthesized antisense oligonucleotide
aattttgacatggtt

SEQ ID NO: 1097 - DNA, 14 bp, Artificial
  Synthesized antisense oligonucleotide
aattttgacatggt

SEQ ID NO: 1098 - DNA, 15 bp, Artificial
  Synthesized antisense oligonucleotide
taattttgacatggt

SEQ ID NO: 1099 - DNA, 14 bp, Artificial
  Synthesized antisense oligonucleotide
taattttgacatgg

SEQ ID NO: 1100 - DNA, 14 bp, Artificial
  Synthesized antisense oligonucleotide
gtaattttgacatg

SEQ ID NO: 1101 - DNA, 15 bp, Artificial
  Synthesized antisense oligonucleotide
tgtaattttgacatg

SEQ ID NO: 1102 - DNA, 14 bp, Artificial
  Synthesized antisense oligonucleotide
tgtaattttgacat

SEQ ID NO: 1103 - DNA, 16 bp, Artificial
  Synthesized antisense oligonucleotide
tctgtaattttgacat

SEQ ID NO: 1104 - DNA, 14 bp, Artificial
  Synthesized antisense oligonucleotide
ctgtaattttgaca

SEQ ID NO: 1105 - DNA, 15 bp, Artificial
  Synthesized antisense oligonucleotide
tctgtaattttgaca

SEQ ID NO: 1106 - DNA, 14 bp, Artificial
  Synthesized antisense oligonucleotide
tctgtaattttgac

SEQ ID NO: 1107 - DNA, 14 bp, Artificial
  Synthesized antisense oligonucleotide
gtctgtaattttga

SEQ ID NO: 1108 - DNA, 16 bp, Artificial
  Synthesized antisense oligonucleotide
aagtctgtaattttga

SEQ ID NO: 1109 - DNA, 14 bp, Artificial
  Synthesized antisense oligonucleotide
agtctgtaattttg

SEQ ID NO: 1110 - DNA, 15 bp, Artificial
  Synthesized antisense oligonucleotide
aagtctgtaattttg

SEQ ID NO: 1111 - DNA, 14 bp, Artificial
  Synthesized antisense oligonucleotide
aagtctgtaatttt

SEQ ID NO: 1112 - DNA, 15 bp, Artificial
  Synthesized antisense oligonucleotide
gaagtctgtaatttt

SEQ ID NO: 1113 - DNA, 14 bp, Artificial
  Synthesized antisense oligonucleotide
gaagtctgtaattt

SEQ ID NO: 1114 - DNA, 14 bp, Artificial
  Synthesized antisense oligonucleotide
atgtagacatcaat

SEQ ID NO: 1115 - DNA, 14 bp, Artificial
  Synthesized antisense oligonucleotide
atcatccaacattt

SEQ ID NO: 1116 - DNA, 15 bp, Artificial
  Synthesized antisense oligonucleotide
aatcatccaacattt

SEQ ID NO: 1117 - DNA, 14 bp, Artificial
  Synthesized antisense oligonucleotide
aatcatccaacatt

SEQ ID NO: 1118 - DNA, 14 bp, Artificial
  Synthesized antisense oligonucleotide
accatcaaatacat

SEQ ID NO: 1119 - DNA, 14 bp, Artificial
  Synthesized antisense oligonucleotide
aaaaacgtctttga

SEQ ID NO: 1120 - DNA, 15 bp, Artificial
  Synthesized antisense oligonucleotide
ttttgttcttagaca

SEQ ID NO: 1121 - DNA, 14 bp, Artificial
  Synthesized antisense oligonucleotide
ttttgttcttagac

SEQ ID NO: 1122 - DNA, 14 bp, Artificial
  Synthesized antisense oligonucleotide
taaacagaaaagca

SEQ ID NO: 1123 - DNA, 14 bp, Artificial
  Synthesized antisense oligonucleotide
actaaacagaaaag

SEQ ID NO: 1124 - DNA, 16 bp, Artificial
  Synthesized antisense oligonucleotide
aaactaaacagaaaag

SEQ ID NO: 1125 - DNA, 14 bp, Artificial
  Synthesized antisense oligonucleotide
aactaaacagaaaa

SEQ ID NO: 1126 - DNA, 15 bp, Artificial
  Synthesized antisense oligonucleotide
aaactaaacagaaaa

SEQ ID NO: 1127 - DNA, 14 bp, Artificial
  Synthesized antisense oligonucleotide
aaactaaacagaaa

SEQ ID NO: 1128 - DNA, 17 bp, Artificial
  Synthesized antisense oligonucleotide
taaaaactaaacagaaa

SEQ ID NO: 1129 - DNA, 14 bp, Artificial
  Synthesized antisense oligonucleotide
aaaactaaacagaa

SEQ ID NO: 1130 - DNA, 17 bp, Artificial
  Synthesized antisense oligonucleotide
gtaaaaactaaacagaa

SEQ ID NO: 1131 - DNA, 14 bp, Artificial
  Synthesized antisense oligonucleotide
aaaaactaaacaga

SEQ ID NO: 1132 - DNA, 15 bp, Artificial
  Synthesized antisense oligonucleotide
taaaaactaaacaga

SEQ ID NO: 1133 - DNA, 14 bp, Artificial
  Synthesized antisense oligonucleotide
taaaaactaaacag

SEQ ID NO: 1134 - DNA, 14 bp, Artificial
  Synthesized antisense oligonucleotide
gtaaaaactaaaca

SEQ ID NO: 1135 - DNA, 19 bp, Artificial
  Synthesized antisense oligonucleotide
aaaaagtaaaaactaaaca

SEQ ID NO: 1136 - DNA, 14 bp, Artificial
  Synthesized antisense oligonucleotide
agtaaaaactaaac

SEQ ID NO: 1137 - DNA, 20 bp, Artificial
  Synthesized antisense oligonucleotide
aaaaaaagtaaaaactaaac

SEQ ID NO: 1138 - DNA, 14 bp, Artificial
  Synthesized antisense oligonucleotide
aagtaaaaactaaa

SEQ ID NO: 1139 - DNA, 19 bp, Artificial
  Synthesized antisense oligonucleotide
aaaaaaagtaaaaactaaa

SEQ ID NO: 1140 - DNA, 14 bp, Artificial
  Synthesized antisense oligonucleotide
aaagtaaaaactaa

SEQ ID NO: 1141 - DNA, 14 bp, Artificial
  Synthesized antisense oligonucleotide
aaaagtaaaaacta

SEQ ID NO: 1142 - DNA, 17 bp, Artificial
  Synthesized antisense oligonucleotide
aaaaaaagtaaaaacta

SEQ ID NO: 1143 - DNA, 14 bp, Artificial
  Synthesized antisense oligonucleotide
aaaaagtaaaaact

SEQ ID NO: 1144 - DNA, 16 bp, Artificial
  Synthesized antisense oligonucleotide
aaaaaaagtaaaaact

SEQ ID NO: 1145 - DNA, 15 bp, Artificial
  Synthesized antisense oligonucleotide
aaaaaaagtaaaaac

SEQ ID NO: 1146 - DNA, 16 bp, Artificial
  Synthesized antisense oligonucleotide
caaaaaaagtaaaaac

SEQ ID NO: 1147 - DNA, 14 bp, Artificial
  Synthesized antisense oligonucleotide
aaaaaaagtaaaaa

SEQ ID NO: 1148 - DNA, 14 bp, Artificial
  Synthesized antisense oligonucleotide
caaaaaaagtaaaa

SEQ ID NO: 1149 - DNA, 20 bp, Artificial
  Synthesized antisense oligonucleotide
aacaaaacaaaaaaagtaaa

SEQ ID NO: 1150 - DNA, 14 bp, Artificial
  Synthesized antisense oligonucleotide
aaacaaaaaaagta

SEQ ID NO: 1151 - DNA, 16 bp, Artificial
  Synthesized antisense oligonucleotide
caaaacaaaaaaagta

SEQ ID NO: 1152 - DNA, 15 bp, Artificial
  Synthesized antisense oligonucleotide
caaaacaaaaaaagt

SEQ ID NO: 1153 - DNA, 14 bp, Artificial
  Synthesized antisense oligonucleotide
caaaacaaaaaaag

SEQ ID NO: 1154 - DNA, 17 bp, Artificial
  Synthesized antisense oligonucleotide
ctttaaaaaaacaaaac

SEQ ID NO: 1155 - DNA, 16 bp, Artificial
  Synthesized antisense oligonucleotide
tctttaaaaaaacaaa

SEQ ID NO: 1156 - DNA, 17 bp, Artificial
  Synthesized antisense oligonucleotide
gtctttaaaaaaacaaa

SEQ ID NO: 1157 - DNA, 15 bp, Artificial
  Synthesized antisense oligonucleotide
gtctttaaaaaaaca

SEQ ID NO: 1158 - DNA, 14 bp, Artificial
  Synthesized antisense oligonucleotide
gtctttaaaaaaac

SEQ ID NO: 1159 - DNA, 14 bp, Artificial
  Synthesized antisense oligonucleotide
tttatttcgtcttt

SEQ ID NO: 1160 - DNA, 14 bp, Artificial
  Synthesized antisense oligonucleotide
tctttatttcgtct

SEQ ID NO: 1161 - DNA, 14 bp, Artificial
  Synthesized antisense oligonucleotide
tatttgcaaatgga

SEQ ID NO: 1162 - DNA, 15 bp, Artificial
  Synthesized antisense oligonucleotide
tatatttgcaaatgg

SEQ ID NO: 1163 - DNA, 14 bp, Artificial
  Synthesized antisense oligonucleotide
tatatttgcaaatg

SEQ ID NO: 1164 - DNA, 16 bp, Artificial
  Synthesized antisense oligonucleotide
ctcaagtctgtaggag

SEQ ID NO: 1165 - DNA, 15 bp, Artificial
  Synthesized antisense oligonucleotide
ggtctgttgtgactc

SEQ ID NO: 1166 - DNA, 19 bp, Artificial
  Synthesized antisense oligonucleotide
caattatcctgcacatttc

SEQ ID NO: 1167 - DNA, 16 bp, Artificial
  Synthesized antisense oligonucleotide
gcagcaattatcctgc

SEQ ID NO: 1168 - DNA, 14 bp, Artificial
  Synthesized antisense oligonucleotide
ggcagcaattatcc

SEQ ID NO: 1169 - DNA, 19 bp, Artificial
  Synthesized antisense oligonucleotide
ggttcgtgtatccatttcc

SEQ ID NO: 1170 - DNA, 14 bp, Artificial
  Synthesized antisense oligonucleotide
gcacagaagttggc

SEQ ID NO: 1171 - DNA, 16 bp, Artificial
  Synthesized antisense oligonucleotide
ccagcacagaagttgg

SEQ ID NO: 1172 - DNA, 14 bp, Artificial
  Synthesized antisense oligonucleotide
gtgctgagtgtctg

SEQ ID NO: 1173 - DNA, 16 bp, Artificial
  Synthesized antisense oligonucleotide
cctgctgtgctgagtg

SEQ ID NO: 1174 - DNA, 14 bp, Artificial
  Synthesized antisense oligonucleotide
gctcaggaccctgc

SEQ ID NO: 1175 - DNA, 15 bp, Artificial
  Synthesized antisense oligonucleotide
gcagcaaggagaagc

SEQ ID NO: 1176 - DNA, 19 bp, Artificial
  Synthesized antisense oligonucleotide
ccaatgtagtagagaatgg

SEQ ID NO: 1177 - DNA, 14 bp, Artificial
  Synthesized antisense oligonucleotide
gctgcatttgcaag

SEQ ID NO: 1178 - DNA, 14 bp, Artificial
  Synthesized antisense oligonucleotide
aaaaaagaaatcaa

SEQ ID NO: 1179 - DNA, 15 bp, Artificial
  Synthesized antisense oligonucleotide
aaaaaaagaaatcaa

SEQ ID NO: 1180 - DNA, 16 bp, Artificial
  Synthesized antisense oligonucleotide
aaaaaaaagaaatcaa

SEQ ID NO: 1181 - DNA, 17 bp, Artificial
  Synthesized antisense oligonucleotide
taaaaaaaagaaatcaa

SEQ ID NO: 1182 - DNA, 18 bp, Artificial
  Synthesized antisense oligonucleotide
ataaaaaaaagaaatcaa

SEQ ID NO: 1183 - DNA, 19 bp, Artificial
  Synthesized antisense oligonucleotide
aataaaaaaaagaaatcaa

SEQ ID NO: 1184 - DNA, 17 bp, Artificial
  Synthesized antisense oligonucleotide
gaataaaaaaaagaaat

SEQ ID NO: 1185 - DNA, 18 bp, Artificial
  Synthesized antisense oligonucleotide
agaataaaaaaaagaaat

SEQ ID NO: 1186 - DNA, 14 bp, Artificial
  Synthesized antisense oligonucleotide
cagaataaaaaaaa

SEQ ID NO: 1187 - DNA, 14 bp, Artificial
  Synthesized antisense oligonucleotide
tcagaataaaaaaa

SEQ ID NO: 1188 - DNA, 14 bp, Artificial
  Synthesized antisense oligonucleotide
ttgtttttaaaagt

SEQ ID NO: 1189 - DNA, 14 bp, Artificial
  Synthesized antisense oligonucleotide
agttgtttttaaaa

SEQ ID NO: 1190 - DNA, 15 bp, Artificial
  Synthesized antisense oligonucleotide
aagttgtttttaaaa

SEQ ID NO: 1191 - DNA, 16 bp, Artificial
  Synthesized antisense oligonucleotide
aaagttgtttttaaaa

SEQ ID NO: 1192 - DNA, 17 bp, Artificial
  Synthesized antisense oligonucleotide
aaaagttgtttttaaaa

SEQ ID NO: 1193 - DNA, 18 bp, Artificial
  Synthesized antisense oligonucleotide
aaaaagttgtttttaaaa

SEQ ID NO: 1194 - DNA, 19 bp, Artificial
  Synthesized antisense oligonucleotide
aaaaaagttgtttttaaaa

SEQ ID NO: 1195 - DNA, 20 bp, Artificial
  Synthesized antisense oligonucleotide
aaaaaaagttgtttttaaaa

SEQ ID NO: 1196 - DNA, 20 bp, Artificial
  Synthesized antisense oligonucleotide
aaaaaaaagttgtttttaaa

SEQ ID NO: 1197 - DNA, 14 bp, Artificial
  Synthesized antisense oligonucleotide
tttttaaaaaagtg

SEQ ID NO: 1198 - DNA, 15 bp, Artificial
  Synthesized antisense oligonucleotide
ttttttaaaaaagtg

SEQ ID NO: 1199 - DNA, 16 bp, Artificial
  Synthesized antisense oligonucleotide
attttttaaaaaagtg

SEQ ID NO: 1200 - DNA, 16 bp, Artificial
  Synthesized antisense oligonucleotide
cattttttaaaaaagt

SEQ ID NO: 1201 - DNA, 15 bp, Artificial
  Synthesized antisense oligonucleotide
gcattttttaaaaaa

SEQ ID NO: 1202 - DNA, 16 bp, Artificial
  Synthesized antisense oligonucleotide
tgcattttttaaaaaa

SEQ ID NO: 1203 - DNA, 14 bp, Artificial
  Synthesized antisense oligonucleotide
agcttattttaaat

SEQ ID NO: 1204 - DNA, 15 bp, Artificial
  Synthesized antisense oligonucleotide
aagcttattttaaat

SEQ ID NO: 1205 - DNA, 16 bp, Artificial
  Synthesized antisense oligonucleotide
taagcttattttaaat

SEQ ID NO: 1206 - DNA, 14 bp, Artificial
  Synthesized antisense oligonucleotide
tgtaattattagat

SEQ ID NO: 1207 - DNA, 15 bp, Artificial
  Synthesized antisense oligonucleotide
atgtaattattagat

SEQ ID NO: 1208 - DNA, 14 bp, Artificial
  Synthesized antisense oligonucleotide
tgatgtaattatta

SEQ ID NO: 1209 - DNA, 15 bp, Artificial
  Synthesized antisense oligonucleotide
atgatgtaattatta

SEQ ID NO: 1210 - DNA, 14 bp, Artificial
  Synthesized antisense oligonucleotide
atggtattatataa

SEQ ID NO: 1211 - DNA, 15 bp, Artificial
  Synthesized antisense oligonucleotide
tatggtattatataa

SEQ ID NO: 1212 - DNA, 16 bp, Artificial
  Synthesized antisense oligonucleotide
ttatggtattatataa

SEQ ID NO: 1213 - DNA, 17 bp, Artificial
  Synthesized antisense oligonucleotide
tttatggtattatataa

SEQ ID NO: 1214 - DNA, 18 bp, Artificial
  Synthesized antisense oligonucleotide
atttatggtattatataa

SEQ ID NO: 1215 - DNA, 14 bp, Artificial
  Synthesized antisense oligonucleotide
aatcatattagaaa

SEQ ID NO: 1216 - DNA, 14 bp, Artificial
  Synthesized antisense oligonucleotide
ttacaatcatatta

SEQ ID NO: 1217 - DNA, 15 bp, Artificial
  Synthesized antisense oligonucleotide
tttacaatcatatta

SEQ ID NO: 1218 - DNA, 16 bp, Artificial
  Synthesized antisense oligonucleotide
ggcatgacgcctttcc

SEQ ID NO: 1219 - DNA, 14 bp, Artificial
  Synthesized antisense oligonucleotide
gcatgacgcctttc

SEQ ID NO: 1220 - DNA, 14 bp, Artificial
  Synthesized antisense oligonucleotide
gcctgacgagaggc

SEQ ID NO: 1221 - DNA, 15 bp, Artificial
  Synthesized antisense oligonucleotide
ctcaagcctgacgag

SEQ ID NO: 1222 - DNA, 16 bp, Artificial
  Synthesized antisense oligonucleotide
ccacagttcctttttc

SEQ ID NO: 1223 - DNA, 18 bp, Artificial
  Synthesized antisense oligonucleotide
gctgcaataaagatacag

SEQ ID NO: 1224 - DNA, 16 bp, Artificial
  Synthesized antisense oligonucleotide
gctgcaataaagatac

SEQ ID NO: 1225 - DNA, 17 bp, Artificial
  Synthesized antisense oligonucleotide
ggacactgatttctatg

SEQ ID NO: 1226 - DNA, 16 bp, Artificial
  Synthesized antisense oligonucleotide
gcattatcaactttgg

SEQ ID NO: 1227 - DNA, 16 bp, Artificial
  Synthesized antisense oligonucleotide
acttttagcaccaatg

SEQ ID NO: 1228 - DNA, 19 bp, Artificial
  Synthesized antisense oligonucleotide
ccaagaaacttttagcacc

SEQ ID NO: 1229 - DNA, 14 bp, Artificial
  Synthesized antisense oligonucleotide
ccagatcatcttcc

SEQ ID NO: 1230 - DNA, 16 bp, Artificial
  Synthesized antisense oligonucleotide
agtcaaggacacatag

SEQ ID NO: 1231 - DNA, 16 bp, Artificial
  Synthesized antisense oligonucleotide
tctttgagcaacatgg

SEQ ID NO: 1232 - DNA, 14 bp, Artificial
  Synthesized antisense oligonucleotide
gggtataacagctg

SEQ ID NO: 1233 - DNA, 18 bp, Artificial
  Synthesized antisense oligonucleotide
gaggtgaaccattaatgg

SEQ ID NO: 1234 - DNA, 16 bp, Artificial
  Synthesized antisense oligonucleotide
tcttcgtatcgtttag

SEQ ID NO: 1235 - DNA, 15 bp, Artificial
  Synthesized antisense oligonucleotide
tgttggatagtgttc

SEQ ID NO: 1236 - DNA, 15 bp, Artificial
  Synthesized antisense oligonucleotide
gttgatcacttgctg

SEQ ID NO: 1237 - DNA, 15 bp, Artificial
  Synthesized antisense oligonucleotide
ggattccattactcg

SEQ ID NO: 1238 - DNA, 20 bp, Artificial
  Synthesized antisense oligonucleotide
gacatatgaaaaatgttgtc

SEQ ID NO: 1239 - DNA, 17 bp, Artificial
  Synthesized antisense oligonucleotide
gccaataaagacatatg

SEQ ID NO: 1240 - DNA, 17 bp, Artificial
  Synthesized antisense oligonucleotide
ccagaatcaagattctg

SEQ ID NO: 1241 - DNA, 16 bp, Artificial
  Synthesized antisense oligonucleotide
ctgttccagaatcaag

SEQ ID NO: 1242 - DNA, 20 bp, Artificial
  Synthesized antisense oligonucleotide
gacaaatctgttccagaatc

SEQ ID NO: 1243 - DNA, 19 bp, Artificial
  Synthesized antisense oligonucleotide
ggaaagacaaatctgttcc

SEQ ID NO: 1244 - DNA, 16 bp, Artificial
  Synthesized antisense oligonucleotide
gattaagaggacaagc

SEQ ID NO: 1245 - DNA, 14 bp, Artificial
  Synthesized antisense oligonucleotide
ggaagattaagagg

SEQ ID NO: 1246 - DNA, 18 bp, Artificial
  Synthesized antisense oligonucleotide
gcagtgtgattattctgg

SEQ ID NO: 1247 - DNA, 19 bp, Artificial
  Synthesized antisense oligonucleotide
ggagaaagatacatatctg

SEQ ID NO: 1248 - DNA, 14 bp, Artificial
  Synthesized antisense oligonucleotide
ggagatcttacagg

SEQ ID NO: 1249 - DNA, 20 bp, Artificial
  Synthesized antisense oligonucleotide
gcatttgcagtagaatttac

SEQ ID NO: 1250 - DNA, 14 bp, Artificial
  Synthesized antisense oligonucleotide
cagtgaaagagagg

SEQ ID NO: 1251 - DNA, 14 bp, Artificial
  Synthesized antisense oligonucleotide
gctagccgatacac

SEQ ID NO: 1252 - DNA, 17 bp, Artificial
  Synthesized antisense oligonucleotide
ggaagatccttgtatgc

SEQ ID NO: 1253 - DNA, 15 bp, Artificial
  Synthesized antisense oligonucleotide
gcatgaggaagatcc

SEQ ID NO: 1254 - DNA, 16 bp, Artificial
  Synthesized antisense oligonucleotide
ggagtcatttttgttg

SEQ ID NO: 1255 - DNA, 19 bp, Artificial
  Synthesized antisense oligonucleotide
ccaattgatactaagattc

SEQ ID NO: 1256 - DNA, 15 bp, Artificial
  Synthesized antisense oligonucleotide
tcttttgagcacacg

SEQ ID NO: 1257 - DNA, 18 bp, Artificial
  Synthesized antisense oligonucleotide
ccttcagcacttcttttg

SEQ ID NO: 1258 - DNA, 16 bp, Artificial
  Synthesized antisense oligonucleotide
ggttgcttccttcagc

SEQ ID NO: 1259 - DNA, 14 bp, Artificial
  Synthesized antisense oligonucleotide
cagtggtttaggag

SEQ ID NO: 1260 - DNA, 17 bp, Artificial
  Synthesized antisense oligonucleotide
cctgagatcctcatttc

SEQ ID NO: 1261 - DNA, 17 bp, Artificial
  Synthesized antisense oligonucleotide
ccaaggtcctgagatcc

SEQ ID NO: 1262 - DNA, 16 bp, Artificial
  Synthesized antisense oligonucleotide
ggtgtacacagtgtcc

SEQ ID NO: 1263 - DNA, 14 bp, Artificial
  Synthesized antisense oligonucleotide
tatctttaatttct

SEQ ID NO: 1264 - DNA, 14 bp, Artificial
  Synthesized antisense oligonucleotide
tcttttgaatataa

SEQ ID NO: 1265 - DNA, 15 bp, Artificial
  Synthesized antisense oligonucleotide
ttcttttgaatataa

SEQ ID NO: 1266 - DNA, 16 bp, Artificial
  Synthesized antisense oligonucleotide
tttcttttgaatataa

SEQ ID NO: 1267 - DNA, 17 bp, Artificial
  Synthesized antisense oligonucleotide
ttttcttttgaatataa

SEQ ID NO: 1268 - DNA, 18 bp, Artificial
  Synthesized antisense oligonucleotide
tttttcttttgaatataa

SEQ ID NO: 1269 - DNA, 14 bp, Artificial
  Synthesized antisense oligonucleotide
atttctatgttttt

SEQ ID NO: 1270 - DNA, 14 bp, Artificial
  Synthesized antisense oligonucleotide
ttaaagaatttatg

SEQ ID NO: 1271 - DNA, 14 bp, Artificial
  Synthesized antisense oligonucleotide
gttaaagaatttat

SEQ ID NO: 1272 - DNA, 15 bp, Artificial
  Synthesized antisense oligonucleotide
agttaaagaatttat

SEQ ID NO: 1273 - DNA, 16 bp, Artificial
  Synthesized antisense oligonucleotide
aagttaaagaatttat

SEQ ID NO: 1274 - DNA, 17 bp, Artificial
  Synthesized antisense oligonucleotide
taagttaaagaatttat

SEQ ID NO: 1275 - DNA, 14 bp, Artificial
  Synthesized antisense oligonucleotide
tttagtaagttaaa

SEQ ID NO: 1276 - DNA, 15 bp, Artificial
  Synthesized antisense oligonucleotide
ttttagtaagttaaa

SEQ ID NO: 1277 - DNA, 14 bp, Artificial
  Synthesized antisense oligonucleotide
atttcttttagtaa

SEQ ID NO: 1278 - DNA, 15 bp, Artificial
  Synthesized antisense oligonucleotide
aatttcttttagtaa

SEQ ID NO: 1279 - DNA, 14 bp, Artificial
  Synthesized antisense oligonucleotide
atcaatttctttta

SEQ ID NO: 1280 - DNA, 15 bp, Artificial
  Synthesized antisense oligonucleotide
tatcaatttctttta

SEQ ID NO: 1281 - DNA, 14 bp, Artificial
  Synthesized antisense oligonucleotide
aatatataagttca

SEQ ID NO: 1282 - DNA, 15 bp, Artificial
  Synthesized antisense oligonucleotide
aaatatataagttca

SEQ ID NO: 1283 - DNA, 14 bp, Artificial
  Synthesized antisense oligonucleotide
caaatatataagtt

SEQ ID NO: 1284 - DNA, 15 bp, Artificial
  Synthesized antisense oligonucleotide
tcaaatatataagtt

SEQ ID NO: 1285 - DNA, 14 bp, Artificial
  Synthesized antisense oligonucleotide
tgtcaaatatataa

SEQ ID NO: 1286 - DNA, 14 bp, Artificial
  Synthesized antisense oligonucleotide
aatttatttcagta

SEQ ID NO: 1287 - DNA, 14 bp, Artificial
  Synthesized antisense oligonucleotide
aataaaaatgtgat

SEQ ID NO: 1288 - DNA, 15 bp, Artificial
  Synthesized antisense oligonucleotide
taataaaaatgtgat

SEQ ID NO: 1289 - DNA, 14 bp, Artificial
  Synthesized antisense oligonucleotide
tagctaataaaaat

SEQ ID NO: 1290 - DNA, 15 bp, Artificial
  Synthesized antisense oligonucleotide
ttagctaataaaaat

SEQ ID NO: 1291 - DNA, 16 bp, Artificial
  Synthesized antisense oligonucleotide
tttagctaataaaaat

SEQ ID NO: 1292 - DNA, 14 bp, Artificial
  Synthesized antisense oligonucleotide
aataaaatagtcaa

SEQ ID NO: 1293 - DNA, 15 bp, Artificial
  Synthesized antisense oligonucleotide
taataaaatagtcaa

SEQ ID NO: 1294 - DNA, 16 bp, Artificial
  Synthesized antisense oligonucleotide
ttaataaaatagtcaa

SEQ ID NO: 1295 - DNA, 17 bp, Artificial
  Synthesized antisense oligonucleotide
tttaataaaatagtcaa

SEQ ID NO: 1296 - DNA, 15 bp, Artificial
  Synthesized antisense oligonucleotide
gtttaataaaatagt

SEQ ID NO: 1297 - DNA, 16 bp, Artificial
  Synthesized antisense oligonucleotide
agtttaataaaatagt

SEQ ID NO: 1298 - DNA, 15 bp, Artificial
  Synthesized antisense oligonucleotide
gagtttaataaaata

SEQ ID NO: 1299 - DNA, 16 bp, Artificial
  Synthesized antisense oligonucleotide
agagtttaataaaata

SEQ ID NO: 1300 - DNA, 14 bp, Artificial
  Synthesized antisense oligonucleotide
aataattcttgtat

SEQ ID NO: 1301 - DNA, 14 bp, Artificial
  Synthesized antisense oligonucleotide
tatattacattcat

SEQ ID NO: 1302 - DNA, 14 bp, Artificial
  Synthesized antisense oligonucleotide
atctatattacatt

SEQ ID NO: 1303 - DNA, 14 bp, Artificial
  Synthesized antisense oligonucleotide
ataaacatttttca

SEQ ID NO: 1304 - DNA, 15 bp, Artificial
  Synthesized antisense oligonucleotide
aataaacatttttca

SEQ ID NO: 1305 - DNA, 16 bp, Artificial
  Synthesized antisense oligonucleotide
aaataaacatttttca

SEQ ID NO: 1306 - DNA, 15 bp, Artificial
  Synthesized antisense oligonucleotide
gaaataaacattttt

SEQ ID NO: 1307 - DNA, 16 bp, Artificial
  Synthesized antisense oligonucleotide
tgaaataaacattttt

SEQ ID NO: 1308 - DNA, 17 bp, Artificial
  Synthesized antisense oligonucleotide
ttgaaataaacattttt

SEQ ID NO: 1309 - DNA, 18 bp, Artificial
  Synthesized antisense oligonucleotide
tttgaaataaacattttt

SEQ ID NO: 1310 - DNA, 19 bp, Artificial
  Synthesized antisense oligonucleotide
ttttgaaataaacattttt

SEQ ID NO: 1311 - DNA, 20 bp, Artificial
  Synthesized antisense oligonucleotide
tttttgaaataaacattttt

SEQ ID NO: 1312 - DNA, 20 bp, Artificial
  Synthesized antisense oligonucleotide
atttttgaaataaacatttt

SEQ ID NO: 1313 - DNA, 19 bp, Artificial
  Synthesized antisense oligonucleotide
aatttttgaaataaacatt

SEQ ID NO: 1314 - DNA, 20 bp, Artificial
  Synthesized antisense oligonucleotide
aaatttttgaaataaacatt

SEQ ID NO: 1315 - DNA, 20 bp, Artificial
  Synthesized antisense oligonucleotide
aaaatttttgaaataaacat

SEQ ID NO: 1316 - DNA, 20 bp, Artificial
  Synthesized antisense oligonucleotide
taaaatttttgaaataaaca

SEQ ID NO: 1317 - DNA, 20 bp, Artificial
  Synthesized antisense oligonucleotide
ataaaatttttgaaataaac

SEQ ID NO: 1318 - DNA, 20 bp, Artificial
  Synthesized antisense oligonucleotide
tataaaatttttgaaataaa

SEQ ID NO: 1319 - DNA, 18 bp, Artificial
  Synthesized antisense oligonucleotide
gtataaaatttttgaaat

SEQ ID NO: 1320 - DNA, 14 bp, Artificial
  Synthesized antisense oligonucleotide
ggtataaaattttt

SEQ ID NO: 1321 - DNA, 15 bp, Artificial
  Synthesized antisense oligonucleotide
aggtataaaattttt

SEQ ID NO: 1322 - DNA, 16 bp, Artificial
  Synthesized antisense oligonucleotide
aaggtataaaattttt

SEQ ID NO: 1323 - DNA, 17 bp, Artificial
  Synthesized antisense oligonucleotide
aaaggtataaaattttt

SEQ ID NO: 1324 - DNA, 18 bp, Artificial
  Synthesized antisense oligonucleotide
aaaaggtataaaattttt

SEQ ID NO: 1325 - DNA, 19 bp, Artificial
  Synthesized antisense oligonucleotide
taaaaggtataaaattttt

SEQ ID NO: 1326 - DNA, 20 bp, Artificial
  Synthesized antisense oligonucleotide
ataaaaggtataaaattttt

SEQ ID NO: 1327 - DNA, 14 bp, Artificial
  Synthesized antisense oligonucleotide
tttagaaagatttt

SEQ ID NO: 1328 - DNA, 14 bp, Artificial
  Synthesized antisense oligonucleotide
aagataaatttctt

SEQ ID NO: 1329 - DNA, 15 bp, Artificial
  Synthesized antisense oligonucleotide
taagataaatttctt

SEQ ID NO: 1330 - DNA, 16 bp, Artificial
  Synthesized antisense oligonucleotide
ttaagataaatttctt

SEQ ID NO: 1331 - DNA, 17 bp, Artificial
  Synthesized antisense oligonucleotide
tttaagataaatttctt

SEQ ID NO: 1332 - DNA, 18 bp, Artificial
  Synthesized antisense oligonucleotide
ttttaagataaatttctt

SEQ ID NO: 1333 - DNA, 19 bp, Artificial
  Synthesized antisense oligonucleotide
tttttaagataaatttctt

SEQ ID NO: 1334 - DNA, 20 bp, Artificial
  Synthesized antisense oligonucleotide
atttttaagataaatttctt

SEQ ID NO: 1335 - DNA, 20 bp, Artificial
  Synthesized antisense oligonucleotide
tatttttaagataaatttct

SEQ ID NO: 1336 - DNA, 18 bp, Artificial
  Synthesized antisense oligonucleotide
ttatttttaagataaatt

SEQ ID NO: 1337 - DNA, 19 bp, Artificial
  Synthesized antisense oligonucleotide
tttatttttaagataaatt

SEQ ID NO: 1338 - DNA, 19 bp, Artificial
  Synthesized antisense oligonucleotide
ctttatttttaagataaat

SEQ ID NO: 1339 - DNA, 20 bp, Artificial
  Synthesized antisense oligonucleotide
tctttatttttaagataaat

SEQ ID NO: 1340 - DNA, 20 bp, Artificial
  Synthesized antisense oligonucleotide
atctttatttttaagataaa

SEQ ID NO: 1341 - DNA, 14 bp, Artificial
  Synthesized antisense oligonucleotide
atctttatttttaa

SEQ ID NO: 1342 - DNA, 15 bp, Artificial
  Synthesized antisense oligonucleotide
gatctttatttttaa

SEQ ID NO: 1343 - DNA, 16 bp, Artificial
  Synthesized antisense oligonucleotide
agatctttatttttaa

SEQ ID NO: 1344 - DNA, 17 bp, Artificial
  Synthesized antisense oligonucleotide
tagatctttatttttaa

SEQ ID NO: 1345 - DNA, 14 bp, Artificial
  Synthesized antisense oligonucleotide
aatcatcattaatt

SEQ ID NO: 1346 - DNA, 15 bp, Artificial
  Synthesized antisense oligonucleotide
aaatcatcattaatt

SEQ ID NO: 1347 - DNA, 16 bp, Artificial
  Synthesized antisense oligonucleotide
aaaatcatcattaatt

SEQ ID NO: 1348 - DNA, 17 bp, Artificial
  Synthesized antisense oligonucleotide
taaaatcatcattaatt

SEQ ID NO: 1349 - DNA, 18 bp, Artificial
  Synthesized antisense oligonucleotide
ttaaaatcatcattaatt

SEQ ID NO: 1350 - DNA, 19 bp, Artificial
  Synthesized antisense oligonucleotide
tttaaaatcatcattaatt

SEQ ID NO: 1351 - DNA, 20 bp, Artificial
  Synthesized antisense oligonucleotide
atttaaaatcatcattaatt

SEQ ID NO: 1352 - DNA, 19 bp, Artificial
  Synthesized antisense oligonucleotide
aatttaaaatcatcattaa

SEQ ID NO: 1353 - DNA, 14 bp, Artificial
  Synthesized antisense oligonucleotide
gaatttaaaatcat

SEQ ID NO: 1354 - DNA, 15 bp, Artificial
  Synthesized antisense oligonucleotide
tgaatttaaaatcat

SEQ ID NO: 1355 - DNA, 14 bp, Artificial
  Synthesized antisense oligonucleotide
ttaaaataggaaat

SEQ ID NO: 1356 - DNA, 14 bp, Artificial
  Synthesized antisense oligonucleotide
aatttctctttaaa

SEQ ID NO: 1357 - DNA, 15 bp, Artificial
  Synthesized antisense oligonucleotide
aaatttctctttaaa

SEQ ID NO: 1358 - DNA, 14 bp, Artificial
  Synthesized antisense oligonucleotide
taaaattttgaatg

SEQ ID NO: 1359 - DNA, 14 bp, Artificial
  Synthesized antisense oligonucleotide
ctaaaattttgaat

SEQ ID NO: 1360 - DNA, 14 bp, Artificial
  Synthesized antisense oligonucleotide
tttgctaaaatttt

SEQ ID NO: 1361 - DNA, 14 bp, Artificial
  Synthesized antisense oligonucleotide
atatgaaaaatgtt

SEQ ID NO: 1362 - DNA, 14 bp, Artificial
  Synthesized antisense oligonucleotide
ttttaaattaagca

SEQ ID NO: 1363 - DNA, 14 bp, Artificial
  Synthesized antisense oligonucleotide
ttgtaaaaatcaaa

SEQ ID NO: 1364 - DNA, 15 bp, Artificial
  Synthesized antisense oligonucleotide
tttgtaaaaatcaaa

SEQ ID NO: 1365 - DNA, 14 bp, Artificial
  Synthesized antisense oligonucleotide
tttgataaaacttt

SEQ ID NO: 1366 - DNA, 14 bp, Artificial
  Synthesized antisense oligonucleotide
atgttttatcattt

SEQ ID NO: 1367 - DNA, 15 bp, Artificial
  Synthesized antisense oligonucleotide
aatgttttatcattt

SEQ ID NO: 1368 - DNA, 16 bp, Artificial
  Synthesized antisense oligonucleotide
aaatgttttatcattt

SEQ ID NO: 1369 - DNA, 17 bp, Artificial
  Synthesized antisense oligonucleotide
taaatgttttatcattt

SEQ ID NO: 1370 - DNA, 14 bp, Artificial
  Synthesized antisense oligonucleotide
tctaaatgttttat

SEQ ID NO: 1371 - DNA, 15 bp, Artificial
  Synthesized antisense oligonucleotide
ttctaaatgttttat

SEQ ID NO: 1372 - DNA, 14 bp, Artificial
  Synthesized antisense oligonucleotide
taagatcaaataaa

SEQ ID NO: 1373 - DNA, 15 bp, Artificial
  Synthesized antisense oligonucleotide
ataagatcaaataaa

SEQ ID NO: 1374 - DNA, 16 bp, Artificial
  Synthesized antisense oligonucleotide
aataagatcaaataaa

SEQ ID NO: 1375 - DNA, 17 bp, Artificial
  Synthesized antisense oligonucleotide
taataagatcaaataaa

SEQ ID NO: 1376 - DNA, 18 bp, Artificial
  Synthesized antisense oligonucleotide
ttaataagatcaaataaa

SEQ ID NO: 1377 - DNA, 19 bp, Artificial
  Synthesized antisense oligonucleotide
tttaataagatcaaataaa

SEQ ID NO: 1378 - DNA, 14 bp, Artificial
  Synthesized antisense oligonucleotide
ttgtttaataagat

SEQ ID NO: 1379 - DNA, 15 bp, Artificial
  Synthesized antisense oligonucleotide
attgtttaataagat

SEQ ID NO: 1380 - DNA, 14 bp, Artificial
  Synthesized antisense oligonucleotide
tgattgtttaataa

SEQ ID NO: 1381 - DNA, 15 bp, Artificial
  Synthesized antisense oligonucleotide
ttgattgtttaataa

SEQ ID NO: 1382 - DNA, 16 bp, Artificial
  Synthesized antisense oligonucleotide
tttgattgtttaataa

SEQ ID NO: 1383 - DNA, 14 bp, Artificial
  Synthesized antisense oligonucleotide
ttttataaaacagt

SEQ ID NO: 1384 - DNA, 15 bp, Artificial
  Synthesized antisense oligonucleotide
tttttataaaacagt

SEQ ID NO: 1385 - DNA, 16 bp, Artificial
  Synthesized antisense oligonucleotide
ttttttataaaacagt

SEQ ID NO: 1386 - DNA, 15 bp, Artificial
  Synthesized antisense oligonucleotide
cttttttataaaaca

SEQ ID NO: 1387 - DNA, 16 bp, Artificial
  Synthesized antisense oligonucleotide
acttttttataaaaca

SEQ ID NO: 1388 - DNA, 15 bp, Artificial
  Synthesized antisense oligonucleotide
cacttttttataaaa

SEQ ID NO: 1389 - DNA, 16 bp, Artificial
  Synthesized antisense oligonucleotide
acacttttttataaaa

SEQ ID NO: 1390 - DNA, 17 bp, Artificial
  Synthesized antisense oligonucleotide
tacacttttttataaaa

SEQ ID NO: 1391 - DNA, 18 bp, Artificial
  Synthesized antisense oligonucleotide
atacacttttttataaaa

SEQ ID NO: 1392 - DNA, 14 bp, Artificial
  Synthesized antisense oligonucleotide
attttgaatttaag

SEQ ID NO: 1393 - DNA, 14 bp, Artificial
  Synthesized antisense oligonucleotide
gattttgaatttaa

SEQ ID NO: 1394 - DNA, 15 bp, Artificial
  Synthesized antisense oligonucleotide
tgattttgaatttaa

SEQ ID NO: 1395 - DNA, 16 bp, Artificial
  Synthesized antisense oligonucleotide
atgattttgaatttaa

SEQ ID NO: 1396 - DNA, 17 bp, Artificial
  Synthesized antisense oligonucleotide
aatgattttgaatttaa

SEQ ID NO: 1397 - DNA, 14 bp, Artificial
  Synthesized antisense oligonucleotide
ataatagaatcata

SEQ ID NO: 1398 - DNA, 15 bp, Artificial
  Synthesized antisense oligonucleotide
tataatagaatcata

SEQ ID NO: 1399 - DNA, 14 bp, Artificial
  Synthesized antisense oligonucleotide
tataatagaatcat

SEQ ID NO: 1400 - DNA, 14 bp, Artificial
  Synthesized antisense oligonucleotide
tactataatagaat

SEQ ID NO: 1401 - DNA, 15 bp, Artificial
  Synthesized antisense oligonucleotide
atactataatagaat

SEQ ID NO: 1402 - DNA, 16 bp, Artificial
  Synthesized antisense oligonucleotide
aatactataatagaat

SEQ ID NO: 1403 - DNA, 14 bp, Artificial
  Synthesized antisense oligonucleotide
agaatactataata

SEQ ID NO: 1404 - DNA, 15 bp, Artificial
  Synthesized antisense oligonucleotide
tagaatactataata

SEQ ID NO: 1405 - DNA, 16 bp, Artificial
  Synthesized antisense oligonucleotide
atagaatactataata

SEQ ID NO: 1406 - DNA, 17 bp, Artificial
  Synthesized antisense oligonucleotide
tatagaatactataata

SEQ ID NO: 1407 - DNA, 18 bp, Artificial
  Synthesized antisense oligonucleotide
ttatagaatactataata

SEQ ID NO: 1408 - DNA, 14 bp, Artificial
  Synthesized antisense oligonucleotide
aatatttgttttca

SEQ ID NO: 1409 - DNA, 15 bp, Artificial
  Synthesized antisense oligonucleotide
aaatatttgttttca

SEQ ID NO: 1410 - DNA, 16 bp, Artificial
  Synthesized antisense oligonucleotide
aaaatatttgttttca

SEQ ID NO: 1411 - DNA, 15 bp, Artificial
  Synthesized antisense oligonucleotide
caaaatatttgtttt

SEQ ID NO: 1412 - DNA, 14 bp, Artificial
  Synthesized antisense oligonucleotide
aaattttatatgga

SEQ ID NO: 1413 - DNA, 14 bp, Artificial
  Synthesized antisense oligonucleotide
tgaaattttatatg

SEQ ID NO: 1414 - DNA, 14 bp, Artificial
  Synthesized antisense oligonucleotide
ctgaaattttatat

SEQ ID NO: 1415 - DNA, 15 bp, Artificial
  Synthesized antisense oligonucleotide
tctgaaattttatat

SEQ ID NO: 1416 - DNA, 16 bp, Artificial
  Synthesized antisense oligonucleotide
ttctgaaattttatat

SEQ ID NO: 1417 - DNA, 14 bp, Artificial
  Synthesized antisense oligonucleotide
atctgatttatttt

SEQ ID NO: 1418 - DNA, 14 bp, Artificial
  Synthesized antisense oligonucleotide
aagatattaaatgt

SEQ ID NO: 1419 - DNA, 14 bp, Artificial
  Synthesized antisense oligonucleotide
tgaagatattaaat

SEQ ID NO: 1420 - DNA, 14 bp, Artificial
  Synthesized antisense oligonucleotide
ataaataacaatga

SEQ ID NO: 1421 - DNA, 15 bp, Artificial
  Synthesized antisense oligonucleotide
tataaataacaatga

SEQ ID NO: 1422 - DNA, 14 bp, Artificial
  Synthesized antisense oligonucleotide
gtataaataacaat

SEQ ID NO: 1423 - DNA, 15 bp, Artificial
  Synthesized antisense oligonucleotide
tgtataaataacaat

SEQ ID NO: 1424 - DNA, 16 bp, Artificial
  Synthesized antisense oligonucleotide
ttgtataaataacaat

SEQ ID NO: 1425 - DNA, 14 bp, Artificial
  Synthesized antisense oligonucleotide
tcttgtataaataa

SEQ ID NO: 1426 - DNA, 15 bp, Artificial
  Synthesized antisense oligonucleotide
atcttgtataaataa

SEQ ID NO: 1427 - DNA, 16 bp, Artificial
  Synthesized antisense oligonucleotide
aatcttgtataaataa

SEQ ID NO: 1428 - DNA, 14 bp, Artificial
  Synthesized antisense oligonucleotide
acaactttttaaat

SEQ ID NO: 1429 - DNA, 15 bp, Artificial
  Synthesized antisense oligonucleotide
tacaactttttaaat

SEQ ID NO: 1430 - DNA, 14 bp, Artificial
  Synthesized antisense oligonucleotide
tacaactttttaaa

SEQ ID NO: 1431 - DNA, 21 bp, Artificial
  Synthesized antisense oligonucleotide
cggggggttttgggcggcatg

SEQ ID NO: 1432 - DNA, 23 bp, Artificial
  Synthesized antisense oligonucleotide
ttttcggggggttttgggcggca

SEQ ID NO: 1433 - DNA, 19 bp, Artificial
  Synthesized antisense oligonucleotide
tcggggggttttgggcggc

SEQ ID NO: 1434 - DNA, 24 bp, Artificial
  Synthesized antisense oligonucleotide
ggtggcggccgtttttcggggggt

SEQ ID NO: 1435 - DNA, 23 bp, Artificial
  Synthesized antisense oligonucleotide
ccgggggttccgcggcggcagcg

SEQ ID NO: 1436 - DNA, 17 bp, Artificial
  Synthesized antisense oligonucleotide
cgggggttccgcggcgg

SEQ ID NO: 1437 - DNA, 23 bp, Artificial
  Synthesized antisense oligonucleotide
ggcggcggtgccgggggttccgc

SEQ ID NO: 1438 - DNA, 22 bp, Artificial
  Synthesized antisense oligonucleotide
ggagggggcggcggcggcggtg

SEQ ID NO: 1439 - DNA, 17 bp, Artificial
  Synthesized antisense oligonucleotide
gggggcggcggcggcgg

SEQ ID NO: 1440 - DNA, 15 bp, Artificial
  Synthesized antisense oligonucleotide
ggggcggcggcggcg

SEQ ID NO: 1441 - DNA, 17 bp, Artificial
  Synthesized antisense oligonucleotide
agggggcctggtggaag

SEQ ID NO: 1442 - DNA, 14 bp, Artificial
  Synthesized antisense oligonucleotide
tagggggcctggtg

SEQ ID NO: 1443 - DNA, 14 bp, Artificial
  Synthesized antisense oligonucleotide
gtagggggcctggt

SEQ ID NO: 1444 - DNA, 26 bp, Artificial
  Synthesized antisense oligonucleotide
gaggtattggtgacaaggtagggggc

SEQ ID NO: 1445 - DNA, 26 bp, Artificial
  Synthesized antisense oligonucleotide
tcttcaggggtgaaatatagatgttc

SEQ ID NO: 1446 - DNA, 16 bp, Artificial
  Synthesized antisense oligonucleotide
ggactcttcaggggtg

SEQ ID NO: 1447 - DNA, 14 bp, Artificial
  Synthesized antisense oligonucleotide
tcggactatactgc

SEQ ID NO: 1448 - DNA, 16 bp, Artificial
  Synthesized antisense oligonucleotide
cagttcggactatact

SEQ ID NO: 1449 - DNA, 14 bp, Artificial
  Synthesized antisense oligonucleotide
aagcctaagacgca

SEQ ID NO: 1450 - DNA, 14 bp, Artificial
  Synthesized antisense oligonucleotide
gcccaagttcaaca

SEQ ID NO: 1451 - DNA, 14 bp, Artificial
  Synthesized antisense oligonucleotide
tgaaaagtcgcggt

SEQ ID NO: 1452 - DNA, 18 bp, Artificial
  Synthesized antisense oligonucleotide
ggttaattaagatgcctc

SEQ ID NO: 1453 - DNA, 14 bp, Artificial
  Synthesized antisense oligonucleotide
tctctaagagcgca

SEQ ID NO: 1454 - DNA, 16 bp, Artificial
  Synthesized antisense oligonucleotide
acgtgaggttagtttg

SEQ ID NO: 1455 - DNA, 14 bp, Artificial
  Synthesized antisense oligonucleotide
cacgtgaggttagt

SEQ ID NO: 1456 - DNA, 14 bp, Artificial
  Synthesized antisense oligonucleotide
catagaacagtccg

SEQ ID NO: 1457 - DNA, 16 bp, Artificial
  Synthesized antisense oligonucleotide
cagtcatagaacagtc

SEQ ID NO: 1458 - DNA, 18 bp, Artificial
  Synthesized antisense oligonucleotide
ctttgcagtcatagaaca

SEQ ID NO: 1459 - DNA, 14 bp, Artificial
  Synthesized antisense oligonucleotide
tgcagtcatagaac

SEQ ID NO: 1460 - DNA, 14 bp, Artificial
  Synthesized antisense oligonucleotide
ggtcgtttccatct

SEQ ID NO: 1461 - DNA, 16 bp, Artificial
  Synthesized antisense oligonucleotide
catagaaggtcgtttc

SEQ ID NO: 1462 - DNA, 14 bp, Artificial
  Synthesized antisense oligonucleotide
cgtcatagaaggtc

SEQ ID NO: 1463 - DNA, 15 bp, Artificial
  Synthesized antisense oligonucleotide
catcgtcatagaagg

SEQ ID NO: 1464 - DNA, 24 bp, Artificial
  Synthesized antisense oligonucleotide
ggacgggaggaacgaggcgttgag

SEQ ID NO: 1465 - DNA, 14 bp, Artificial
  Synthesized antisense oligonucleotide
tagccataaggtcc

SEQ ID NO: 1466 - DNA, 14 bp, Artificial
  Synthesized antisense oligonucleotide
ggttactgtagcca

SEQ ID NO: 1467 - DNA, 14 bp, Artificial
  Synthesized antisense oligonucleotide
ggttactgtagcca

SEQ ID NO: 1468 - DNA, 18 bp, Artificial
  Synthesized antisense oligonucleotide
agttcttggcgcggaggt

SEQ ID NO: 1469 - DNA, 18 bp, Artificial
  Synthesized antisense oligonucleotide
aggtgaggaggtccgagt

SEQ ID NO: 1470 - DNA, 16 bp, Artificial
  Synthesized antisense oligonucleotide
tggactggattatcag

SEQ ID NO: 1471 - DNA, 18 bp, Artificial
  Synthesized antisense oligonucleotide
gtggtggtgatgtgcccg

SEQ ID NO: 1472 - DNA, 14 bp, Artificial
  Synthesized antisense oligonucleotide
tgtcacgttcttgg

SEQ ID NO: 1473 - DNA, 14 bp, Artificial
  Synthesized antisense oligonucleotide
ctcatctgtcacgt

SEQ ID NO: 1474 - DNA, 18 bp, Artificial
  Synthesized antisense oligonucleotide
cgaagccctcggcgaacc

SEQ ID NO: 1475 - DNA, 24 bp, Artificial
  Synthesized antisense oligonucleotide
gcgtgttctggctgtgcagttcgg

SEQ ID NO: 1476 - DNA, 14 bp, Artificial
  Synthesized antisense oligonucleotide
ctgccccgttgacc

SEQ ID NO: 1477 - DNA, 14 bp, Artificial
  Synthesized antisense oligonucleotide
aggtttgcgtagac

SEQ ID NO: 1478 - DNA, 14 bp, Artificial
  Synthesized antisense oligonucleotide
ggttgaagttgctg

SEQ ID NO: 1479 - DNA, 14 bp, Artificial
  Synthesized antisense oligonucleotide
ctgggttgaagttg

SEQ ID NO: 1480 - DNA, 20 bp, Artificial
  Synthesized antisense oligonucleotide
tgctgcacgggcatctgctg

SEQ ID NO: 1481 - DNA, 27 bp, Artificial
  Synthesized antisense oligonucleotide
ggcactgtctgaggctcctccttcagg

SEQ ID NO: 1482 - DNA, 14 bp, Artificial
  Synthesized antisense oligonucleotide
actccatgtcgatg

SEQ ID NO: 1483 - DNA, 16 bp, Artificial
  Synthesized antisense oligonucleotide
ctctccgccttgatcc

SEQ ID NO: 1484 - DNA, 16 bp, Artificial
  Synthesized antisense oligonucleotide
gttcctcatgcgcttc

SEQ ID NO: 1485 - DNA, 14 bp, Artificial
  Synthesized antisense oligonucleotide
ctgagctttcaagg

SEQ ID NO: 1486 - DNA, 26 bp, Artificial
  Synthesized antisense oligonucleotide
gcgattctctccagcttcctttttcg

SEQ ID NO: 1487 - DNA, 30 bp, Artificial; identical to SEQ ID NO: 295
  Synthesized antisense oligonucleotide

SEQ ID NO: 1488 - DNA, 14 bp, Artificial
  Synthesized antisense oligonucleotide
tccctgagcatgtt

SEQ ID NO: 1489 - DNA, 16 bp, Artificial
  Synthesized antisense oligonucleotide
tctgtttaagctgtgc

SEQ ID NO: 1490 - DNA, 18 bp, Artificial
  Synthesized antisense oligonucleotide
ctttctgtttaagctgtg

SEQ ID NO: 1491 - DNA, 16 bp, Artificial
  Synthesized antisense oligonucleotide
ggttcatgactttctg

SEQ ID NO: 1492 - DNA, 14 bp, Artificial
  Synthesized antisense oligonucleotide
cgtggttcatgact

SEQ ID NO: 1493 - DNA, 16 bp, Artificial
  Synthesized antisense oligonucleotide
actgttaacgtggttc

SEQ ID NO: 1494 - DNA, 14 bp, Artificial
  Synthesized antisense oligonucleotide
ccactgttaacgtg

SEQ ID NO: 1495 - DNA, 14 bp, Artificial
  Synthesized antisense oligonucleotide
cccactgttaacgt

SEQ ID NO: 1496 - DNA, 14 bp, Artificial
  Synthesized antisense oligonucleotide
agcatgagttggca

SEQ ID NO: 1497 - DNA, 14 bp, Artificial
  Synthesized antisense oligonucleotide
gcgttagcatgagt

SEQ ID NO: 1498 - DNA, 14 bp, Artificial
  Synthesized antisense oligonucleotide
gtttgcaactgctg

SEQ ID NO: 1499 - DNA, 18 bp, Artificial
  Synthesized antisense oligonucleotide
caaaatgtttgcaactgc

SEQ ID NO: 1500 - DNA, 18 bp, Artificial
  Synthesized antisense oligonucleotide
tccattttagtgcacatc

SEQ ID NO: 1501 - DNA, 18 bp, Artificial
  Synthesized antisense oligonucleotide
ctgttccattttagtgca

SEQ ID NO: 1502 - DNA, 14 bp, Artificial
  Synthesized antisense oligonucleotide
gtgtatgagtcgtc

SEQ ID NO: 1503 - DNA, 14 bp, Artificial
  Synthesized antisense oligonucleotide
ctgtgtatgagtcg

SEQ ID NO: 1504 - DNA, 14 bp, Artificial
  Synthesized antisense oligonucleotide
cgtagctgtgtatg

SEQ ID NO: 1505 - DNA, 14 bp, Artificial
  Synthesized antisense oligonucleotide
tcgtgtagagagag

SEQ ID NO: 1506 - DNA, 18 bp, Artificial
  Synthesized antisense oligonucleotide
agtttgtagtcgtgtaga

SEQ ID NO: 1507 - DNA, 16 bp, Artificial
  Synthesized antisense oligonucleotide
gtttgtagtcgtgtag

SEQ ID NO: 1508 - DNA, 14 bp, Artificial
  Synthesized antisense oligonucleotide
agtttgtagtcgtg

SEQ ID NO: 1509 - DNA, 14 bp, Artificial
  Synthesized antisense oligonucleotide
ggagtttgtagtcg

SEQ ID NO: 1510 - DNA, 16 bp, Artificial
  Synthesized antisense oligonucleotide
tcaggagtttgtagtc

SEQ ID NO: 1511 - DNA, 18 bp, Artificial
  Synthesized antisense oligonucleotide
gtttcaggagtttgtagt

SEQ ID NO: 1512 - DNA, 14 bp, Artificial
  Synthesized antisense oligonucleotide
tcggtttcaggagt

SEQ ID NO: 1513 - DNA, 14 bp, Artificial
  Synthesized antisense oligonucleotide
ttgagactccggta

SEQ ID NO: 1514 - DNA, 16 bp, Artificial
  Synthesized antisense oligonucleotide
accagaaaagtagctg

SEQ ID NO: 1515 - DNA, 14 bp, Artificial
  Synthesized antisense oligonucleotide
cctgaccagaaaag

SEQ ID NO: 1516 - DNA, 14 bp, Artificial
  Synthesized antisense oligonucleotide
attcaggcgttcca

SEQ ID NO: 1517 - DNA, 16 bp, Artificial
  Synthesized antisense oligonucleotide
ggtaaaagtactgtcc

SEQ ID NO: 1518 - DNA, 16 bp, Artificial
  Synthesized antisense oligonucleotide
gggtaaaagtactgtc

SEQ ID NO: 1519 - DNA, 18 bp, Artificial
  Synthesized antisense oligonucleotide
gcacctccaccgctgcca

SEQ ID NO: 1520 - DNA, 18 bp, Artificial
  Synthesized antisense oligonucleotide
ctcctgctcctcggtgac

SEQ ID NO: 1521 - DNA, 14 bp, Artificial
  Synthesized antisense oligonucleotide
gctttgacaaagcc

SEQ ID NO: 1522 - DNA, 14 bp, Artificial
  Synthesized antisense oligonucleotide
cttgtgcagatcgt

SEQ ID NO: 1523 - DNA, 16 bp, Artificial
  Synthesized antisense oligonucleotide
tcatcttgtgcagatc

SEQ ID NO: 1524 - DNA, 16 bp, Artificial
  Synthesized antisense oligonucleotide
gttcatcttgtgcaga

SEQ ID NO: 1525 - DNA, 14 bp, Artificial
  Synthesized antisense oligonucleotide
cgtggttcatcttg

SEQ ID NO: 1526 - DNA, 14 bp, Artificial
  Synthesized antisense oligonucleotide
tcacgtggttcatc

SEQ ID NO: 1527 - DNA, 14 bp, Artificial
  Synthesized antisense oligonucleotide
ggttggtgtaaacg

SEQ ID NO: 1528 - DNA, 20 bp, Artificial
  Synthesized antisense oligonucleotide
tacgagctcccggtcccgac

SEQ ID NO: 1529 - DNA, 14 bp, Artificial
  Synthesized antisense oligonucleotide
tagctgatggtggt

SEQ ID NO: 1530 - DNA, 14 bp, Artificial
  Synthesized antisense oligonucleotide
tccttgaaggtgga

SEQ ID NO: 1531 - DNA, 16 bp, Artificial
  Synthesized antisense oligonucleotide
tcttccatgttgatgg

SEQ ID NO: 1532 - DNA, 14 bp, Artificial
  Synthesized antisense oligonucleotide
ctttgatgcgctct

SEQ ID NO: 1533 - DNA, 14 bp, Artificial
  Synthesized antisense oligonucleotide
ctccactttgatgc

SEQ ID NO: 1534 - DNA, 30 bp, Artificial
  Synthesized antisense oligonucleotide
gctccagcttccgcttccggcacttggtgg

SEQ ID NO: 1535 - DNA, 30 bp, Artificial
  Synthesized antisense oligonucleotide
ggccttgagcgtcttcaccttgtcctccag

SEQ ID NO: 1536 - DNA, 16 bp, Artificial
  Synthesized antisense oligonucleotide
tgaccttctgtttgag

SEQ ID NO: 1537 - DNA, 16 bp, Artificial
  Synthesized antisense oligonucleotide
catgaccttctgtttg

SEQ ID NO: 1538 - DNA, 14 bp, Artificial
  Synthesized antisense oligonucleotide
gtcatgaccttctg

SEQ ID NO: 1539 - DNA, 14 bp, Artificial
  Synthesized antisense oligonucleotide
cgagaacatcatcg

SEQ ID NO: 1540 - DNA, 14 bp, Artificial
  Synthesized antisense oligonucleotide
gtagtctgcgttga

SEQ ID NO: 1541 - DNA, 20 bp, Artificial
  Synthesized antisense oligonucleotide
gctgcagcgggaggatgacg

SEQ ID NO: 1542 - DNA, 16 bp, Artificial
  Synthesized antisense oligonucleotide
agtaagagaggctatc

SEQ ID NO: 1543 - DNA, 14 bp, Artificial
  Synthesized antisense oligonucleotide
gtagtaagagaggc

SEQ ID NO: 1544 - DNA, 14 bp, Artificial
  Synthesized antisense oligonucleotide
ggtagtaagagagg

SEQ ID NO: 1545 - DNA, 16 bp, Artificial
  Synthesized antisense oligonucleotide
gtgagtggtagtaaga

SEQ ID NO: 1546 - DNA, 18 bp, Artificial
  Synthesized antisense oligonucleotide
gtccgtgcagaagtcctg

SEQ ID NO: 1547 - DNA, 16 bp, Artificial
  Synthesized antisense oligonucleotide
gaatgaagttggcact

SEQ ID NO: 1548 - DNA, 14 bp, Artificial
  Synthesized antisense oligonucleotide
ggaatgaagttggc

SEQ ID NO: 1549 - DNA, 14 bp, Artificial
  Synthesized antisense oligonucleotide
gggaatgaagttgg

SEQ ID NO: 1550 - DNA, 30 bp, Artificial; identical to SEQ ID NO: 323
  Synthesized antisense oligonucleotide

SEQ ID NO: 1551 - DNA, 16 bp, Artificial
  Synthesized antisense oligonucleotide
tcatggtcttcacaac

SEQ ID NO: 1552 - DNA, 30 bp, Artificial; identical to SEQ ID NO: 326
  Synthesized antisense oligonucleotide

SEQ ID NO: 1553 - DNA, 14 bp, Artificial
  Synthesized antisense oligonucleotide
ctagagttcctcac

SEQ ID NO: 1554 - DNA, 14 bp, Artificial
  Synthesized antisense oligonucleotide
gagtacgctagagt

SEQ ID NO: 1555 - DNA, 14 bp, Artificial
  Synthesized antisense oligonucleotide
gaagagtacgctag

SEQ ID NO: 1556 - DNA, 28 bp, Artificial
  Synthesized antisense oligonucleotide
ctgcttcccacccagcccccacattccc

SEQ ID NO: 1557 - DNA, 20 bp, Artificial
  Synthesized antisense oligonucleotide
ttcatcctctgtactgggct

SEQ ID NO: 1558 - DNA, 14 bp, Artificial
  Synthesized antisense oligonucleotide
gttacggatgtgca

SEQ ID NO: 1559 - DNA, 14 bp, Artificial
  Synthesized antisense oligonucleotide
cagttacggatgtg

SEQ ID NO: 1560 - DNA, 14 bp, Artificial
  Synthesized antisense oligonucleotide
ccagttacggatgt

SEQ ID NO: 1561 - DNA, 14 bp, Artificial
  Synthesized antisense oligonucleotide
agagtctgagttgg

SEQ ID NO: 1562 - DNA, 14 bp, Artificial
  Synthesized antisense oligonucleotide
gtgagactcagagt

SEQ ID NO: 1563 - DNA, 14 bp, Artificial
  Synthesized antisense oligonucleotide
tcttagggtgagac

SEQ ID NO: 1564 - DNA, 16 bp, Artificial
  Synthesized antisense oligonucleotide
gagagtacttcttagg

SEQ ID NO: 1565 - DNA, 18 bp, Artificial
  Synthesized antisense oligonucleotide
ggaagaaactatgagagt

SEQ ID NO: 1566 - DNA, 18 bp, Artificial
  Synthesized antisense oligonucleotide
cttagggaagaaactatg

SEQ ID NO: 1567 - DNA, 16 bp, Artificial
  Synthesized antisense oligonucleotide
cggtaagaaacttagg

SEQ ID NO: 1568 - DNA, 14 bp, Artificial
  Synthesized antisense oligonucleotide
agcatgcggtaaga

SEQ ID NO: 1569 - DNA, 14 bp, Artificial
  Synthesized antisense oligonucleotide
gtctgaaagcatgc

SEQ ID NO: 1570 - DNA, 16 bp, Artificial
  Synthesized antisense oligonucleotide
agaacaaagaagagcc

SEQ ID NO: 1571 - DNA, 18 bp, Artificial
  Synthesized antisense oligonucleotide
caagagaacaaagaagag

SEQ ID NO: 1572 - DNA, 16 bp, Artificial
  Synthesized antisense oligonucleotide
cagcaagagaacaaag

SEQ ID NO: 1573 - DNA, 14 bp, Artificial
  Synthesized antisense oligonucleotide
tcctcagcaagaga

SEQ ID NO: 1574 - DNA, 14 bp, Artificial
  Synthesized antisense oligonucleotide
aggtgtgacttgca

SEQ ID NO: 1575 - DNA, 16 bp, Artificial
  Synthesized antisense oligonucleotide
gaataggtgtgacttg

SEQ ID NO: 1576 - DNA, 16 bp, Artificial
  Synthesized antisense oligonucleotide
cagaataggtgtgact

SEQ ID NO: 1577 - DNA, 14 bp, Artificial
  Synthesized antisense oligonucleotide
gcagaataggtgtg

SEQ ID NO: 1578 - DNA, 16 bp, Artificial
  Synthesized antisense oligonucleotide
cagttgcagaataggt

SEQ ID NO: 1579 - DNA, 16 bp, Artificial
  Synthesized antisense oligonucleotide
gaaaccatttctgacc

SEQ ID NO: 1580 - DNA, 18 bp, Artificial
  Synthesized antisense oligonucleotide
tgtgaaaccatttctgac

SEQ ID NO: 1581 - DNA, 18 bp, Artificial
  Synthesized antisense oligonucleotide
cactgtgaaaccatttct

SEQ ID NO: 1582 - DNA, 14 bp, Artificial
  Synthesized antisense oligonucleotide
ccactgtgaaacca

SEQ ID NO: 1583 - DNA, 30 bp, Artificial; identical to SEQ ID NO: 357
  Synthesized antisense oligonucleotide

SEQ ID NO: 1584 - DNA, 15 bp, Artificial
  Synthesized antisense oligonucleotide
cacctccattcaccc

SEQ ID NO: 1585 - DNA, 16 bp, Artificial
  Synthesized antisense oligonucleotide
cagtaaaagtgtctgc

SEQ ID NO: 1586 - DNA, 18 bp, Artificial
  Synthesized antisense oligonucleotide
cgacattcagtaaaagtg

SEQ ID NO: 1587 - DNA, 14 bp, Artificial
  Synthesized antisense oligonucleotide
gaccgacattcagt

SEQ ID NO: 1588 - DNA, 18 bp, Artificial
  Synthesized antisense oligonucleotide
cttctggagataactaga

SEQ ID NO: 1589 - DNA, 18 bp, Artificial
  Synthesized antisense oligonucleotide
catcttattcctttccct

SEQ ID NO: 1590 - DNA, 16 bp, Artificial
  Synthesized antisense oligonucleotide
cagccatcttattcct

SEQ ID NO: 1591 - DNA, 16 bp, Artificial
  Synthesized antisense oligonucleotide
tgcagccatcttattc

SEQ ID NO: 1592 - DNA, 15 bp, Artificial
  Synthesized antisense oligonucleotide
gagtgtatcagtcag

SEQ ID NO: 1593 - DNA, 14 bp, Artificial
  Synthesized antisense oligonucleotide
ggagtgtatcagtc

SEQ ID NO: 1594 - DNA, 16 bp, Artificial
  Synthesized antisense oligonucleotide
cttggagtgtatcagt

SEQ ID NO: 1595 - DNA, 14 bp, Artificial
  Synthesized antisense oligonucleotide
acagagtacctacc

SEQ ID NO: 1596 - DNA, 16 bp, Artificial
  Synthesized antisense oligonucleotide
ccaactttcccttaag

SEQ ID NO: 1597 - DNA, 16 bp, Artificial
  Synthesized antisense oligonucleotide
ccttatgctcaatctc

SEQ ID NO: 1598 - DNA, 14 bp, Artificial
  Synthesized antisense oligonucleotide
gtcttactcaaggg

SEQ ID NO: 1599 - DNA, 16 bp, Artificial
  Synthesized antisense oligonucleotide
acagtcttactcaagg

SEQ ID NO: 1600 - DNA, 18 bp, Artificial
  Synthesized antisense oligonucleotide
cataagacacagtcttac

SEQ ID NO: 1601 - DNA, 18 bp, Artificial
  Synthesized antisense oligonucleotide
gaaagcataagacacagt

SEQ ID NO: 1602 - DNA, 16 bp, Artificial
  Synthesized antisense oligonucleotide
ggaaagcataagacac

SEQ ID NO: 1603 - DNA, 16 bp, Artificial
  Synthesized antisense oligonucleotide
agggataaaggaaagc

SEQ ID NO: 1604 - DNA, 14 bp, Artificial
  Synthesized antisense oligonucleotide
cctgtatacagagg

SEQ ID NO: 1605 - DNA, 16 bp, Artificial
  Synthesized antisense oligonucleotide
tgtctcctgtatacag

SEQ ID NO: 1606 - DNA, 16 bp, Artificial
  Synthesized antisense oligonucleotide
catcttctagttggtc

SEQ ID NO: 1607 - DNA, 16 bp, Artificial
  Synthesized antisense oligonucleotide
ctcatcttctagttgg

SEQ ID NO: 1608 - DNA, 18 bp, Artificial
  Synthesized antisense oligonucleotide
cttctcatcttctagttg

SEQ ID NO: 1609 - DNA, 16 bp, Artificial
  Synthesized antisense oligonucleotide
caaagcagacttctca

SEQ ID NO: 1610 - DNA, 14 bp, Artificial
  Synthesized antisense oligonucleotide
ctgcaaagcagact

SEQ ID NO: 1611 - DNA, 18 bp, Artificial
  Synthesized antisense oligonucleotide
ctagtttttccttctcct

SEQ ID NO: 1612 - DNA, 18 bp, Artificial
  Synthesized antisense oligonucleotide
tctagtttttccttctcc

SEQ ID NO: 1613 - DNA, 16 bp, Artificial
  Synthesized antisense oligonucleotide
caggatgaactctagt

SEQ ID NO: 1614 - DNA, 14 bp, Artificial
  Synthesized antisense oligonucleotide
tcgtagaaggtcgt

SEQ ID NO: 1615 - DNA, 14 bp, Artificial
  Synthesized antisense oligonucleotide
agggttactgtagc

SEQ ID NO: 1616 - DNA, 14 bp, Artificial
  Synthesized antisense oligonucleotide
gtagtggtgatgtg

SEQ ID NO: 1617 - DNA, 14 bp, Artificial
  Synthesized antisense oligonucleotide
cgtcgtagaaggtc

SEQ ID NO: 1618 - DNA, 14 bp, Artificial
  Synthesized antisense oligonucleotide
tttcgtgcacatcc

SEQ ID NO: 1619 - DNA, 18 bp, Artificial
  Synthesized antisense oligonucleotide
agtttgtagtcgtgaaga

SEQ ID NO: 1620 - DNA, 14 bp, Artificial
  Synthesized antisense oligonucleotide
cgagaacatcatgg

SEQ ID NO: 1621 - DNA, 14 bp, Artificial
  Synthesized antisense oligonucleotide
gtagtaggaaaggc

SEQ ID NO: 1622 - DNA, 14 bp, Artificial
  Synthesized antisense oligonucleotide
ggtagtaggaaagg

SEQ ID NO: 1623 - DNA, 14 bp, Artificial
  Synthesized antisense oligonucleotide
ggaatggtagtagg

SEQ ID NO: 1624 - DNA, 15 bp, Artificial
  Synthesized antisense oligonucleotide
ggtcattgagaagag

SEQ ID NO: 1625 - DNA, 16 bp, Artificial
  Synthesized antisense oligonucleotide
gctaatgttcttgacc

SEQ ID NO: 1626 - DNA, 14 bp, Artificial
  Synthesized antisense oligonucleotide
gccaaggtcctcat

SEQ ID NO: 1627 - DNA, 14 bp, Artificial
  Synthesized antisense oligonucleotide
ggagtctatctcca

SEQ ID NO: 1628 - DNA, 16 bp, Artificial
  Synthesized antisense oligonucleotide
ccaaagaatcctgact

SEQ ID NO: 1629 - DNA, 14 bp, Artificial
  Synthesized antisense oligonucleotide
cacatgcttagtgg

SEQ ID NO: 1630 - DNA, 14 bp, Artificial
  Synthesized antisense oligonucleotide
ctcgtaaatgaccg

SEQ ID NO: 1631 - DNA, 18 bp, Artificial
  Synthesized antisense oligonucleotide
aggaatctcgtaaatgac

SEQ ID NO: 1632 - DNA, 14 bp, Artificial
  Synthesized antisense oligonucleotide
cagcagcgattcat

SEQ ID NO: 1633 - DNA, 16 bp, Artificial
  Synthesized antisense oligonucleotide
ggagatcatcaaagga

SEQ ID NO: 1634 - DNA, 14 bp, Artificial
  Synthesized antisense oligonucleotide
ctcagcaatggtca

SEQ ID NO: 1635 - DNA, 14 bp, Artificial
  Synthesized antisense oligonucleotide
gatctcgaacacct

SEQ ID NO: 1636 - DNA, 18 bp, Artificial
  Synthesized antisense oligonucleotide
cacaatctcgatctttct

SEQ ID NO: 1637 - DNA, 18 bp, Artificial
  Synthesized antisense oligonucleotide
ccttcttaaagattggct

SEQ ID NO: 1638 - DNA, 14 bp, Artificial
  Synthesized antisense oligonucleotide
cacataccaactgg

SEQ ID NO: 1639 - DNA, 14 bp, Artificial
  Synthesized antisense oligonucleotide
agcttgatgtgagg

SEQ ID NO: 1640 - DNA, 18 bp, Artificial
  Synthesized antisense oligonucleotide
gaagttgtagcttgatgt

SEQ ID NO: 1641 - DNA, 16 bp, Artificial
  Synthesized antisense oligonucleotide
gcttgaagttgtagct

SEQ ID NO: 1642 - DNA, 16 bp, Artificial
  Synthesized antisense oligonucleotide
ctgcttgaagttgtag

SEQ ID NO: 1643 - DNA, 14 bp, Artificial
  Synthesized antisense oligonucleotide
gacacaactcctct

SEQ ID NO: 1644 - DNA, 18 bp, Artificial
  Synthesized antisense oligonucleotide
tcctttgatagacacaac

SEQ ID NO: 1645 - DNA, 16 bp, Artificial
  Synthesized antisense oligonucleotide
ctcgtttgatagacac

SEQ ID NO: 1646 - DNA, 14 bp, Artificial
  Synthesized antisense oligonucleotide
ggttagcacacact

SEQ ID NO: 1647 - DNA, 14 bp, Artificial
  Synthesized antisense oligonucleotide
ggtaacggttagca

SEQ ID NO: 1648 - DNA, 18 bp, Artificial
  Synthesized antisense oligonucleotide
cgtaacacatttagaagc

SEQ ID NO: 1649 - DNA, 14 bp, Artificial
  Synthesized antisense oligonucleotide
ctcatccgtaacac

SEQ ID NO: 1650 - DNA, 18 bp, Artificial
  Synthesized antisense oligonucleotide
ccggtaagtattgtagtt

SEQ ID NO: 1651 - DNA, 16 bp, Artificial
  Synthesized antisense oligonucleotide
ggtgtatttccttgac

SEQ ID NO: 1652 - DNA, 16 bp, Artificial
  Synthesized antisense oligonucleotide
acataccaactggtgt

SEQ ID NO: 1653 - DNA, 14 bp, Artificial
  Synthesized antisense oligonucleotide
gtccctatacgaac

SEQ ID NO: 1654 - DNA, 14 bp, Artificial
  Synthesized antisense oligonucleotide
ttcatgtctgtgcc

SEQ ID NO: 1655 - DNA, 14 bp, Artificial
  Synthesized antisense oligonucleotide
gtaggtgagttcca

SEQ ID NO: 1656 - DNA, 14 bp, Artificial
  Synthesized antisense oligonucleotide
gttgtgagcgatga

SEQ ID NO: 1657 - DNA, 18 bp, Artificial
  Synthesized antisense oligonucleotide
catagttgtcctcaaaga

SEQ ID NO: 1658 - DNA, 14 bp, Artificial
  Synthesized antisense oligonucleotide
ggcatagttgtcct

SEQ ID NO: 1659 - DNA, 14 bp, Artificial
  Synthesized antisense oligonucleotide
cattgtctagcacg

SEQ ID NO: 1660 - DNA, 14 bp, Artificial
  Synthesized antisense oligonucleotide
ctccattgtctagc

SEQ ID NO: 1661 - DNA, 14 bp, Artificial
  Synthesized antisense oligonucleotide
gtattgttcagcgg

SEQ ID NO: 1662 - DNA, 16 bp, Artificial
  Synthesized antisense oligonucleotide
tcaagatctctgtgag

SEQ ID NO: 1663 - DNA, 16 bp, Artificial
  Synthesized antisense oligonucleotide
cacaaaatcgtgtcct

SEQ ID NO: 1664 - DNA, 16 bp, Artificial
  Synthesized antisense oligonucleotide
tccttccacaaaatcg

SEQ ID NO: 1665 - DNA, 14 bp, Artificial
  Synthesized antisense oligonucleotide
gtggaagatgtcct

SEQ ID NO: 1666 - DNA, 16 bp, Artificial
  Synthesized antisense oligonucleotide
tcttgtggaagatgtc

SEQ ID NO: 1667 - DNA, 16 bp, Artificial
  Synthesized antisense oligonucleotide
tctatcagtgtgagag

SEQ ID NO: 1668 - DNA, 14 bp, Artificial
  Synthesized antisense oligonucleotide
ggttggtgtctatc

SEQ ID NO: 1669 - DNA, 14 bp, Artificial
  Synthesized antisense oligonucleotide
acatcggagaacag

SEQ ID NO: 1670 - DNA, 14 bp, Artificial
  Synthesized antisense oligonucleotide
ccttacacatcgga

SEQ ID NO: 1671 - DNA, 16 bp, Artificial
  Synthesized antisense oligonucleotide
acaatcctcagaactc

SEQ ID NO: 1672 - DNA, 14 bp, Artificial
  Synthesized antisense oligonucleotide
gctctgacaatcct

SEQ ID NO: 1673 - DNA, 14 bp, Artificial
  Synthesized antisense oligonucleotide
tggttgaagtggag

SEQ ID NO: 1674 - DNA, 14 bp, Artificial
  Synthesized antisense oligonucleotide
ctgtggttgaagtg

SEQ ID NO: 1675 - DNA, 14 bp, Artificial
  Synthesized antisense oligonucleotide
gttgtaggtgacca

SEQ ID NO: 1676 - DNA, 14 bp, Artificial
  Synthesized antisense oligonucleotide
ctgtgttgtaggtg

SEQ ID NO: 1677 - DNA, 14 bp, Artificial
  Synthesized antisense oligonucleotide
gactcaaacgtgtc

SEQ ID NO: 1678 - DNA, 14 bp, Artificial
  Synthesized antisense oligonucleotide
catggactcaaacg

SEQ ID NO: 1679 - DNA, 14 bp, Artificial
  Synthesized antisense oligonucleotide
cgaatgtataccgg

SEQ ID NO: 1680 - DNA, 14 bp, Artificial
  Synthesized antisense oligonucleotide
ccgaatgtataccg

SEQ ID NO: 1681 - DNA, 14 bp, Artificial
  Synthesized antisense oligonucleotide
gccgaatgtatacc

SEQ ID NO: 1682 - DNA, 14 bp, Artificial
  Synthesized antisense oligonucleotide
gtagttgtagggac

SEQ ID NO: 1683 - DNA, 18 bp, Artificial
  Synthesized antisense oligonucleotide
tagaaaggtagttgtagg

SEQ ID NO: 1684 - DNA, 18 bp, Artificial
  Synthesized antisense oligonucleotide
gtagaaaggtagttgtag

SEQ ID NO: 1685 - DNA, 16 bp, Artificial
  Synthesized antisense oligonucleotide
cgtagaaaggtagttg

SEQ ID NO: 1686 - DNA, 14 bp, Artificial
  Synthesized antisense oligonucleotide
ccgtagaaaggtag

SEQ ID NO: 1687 - DNA, 14 bp, Artificial
  Synthesized antisense oligonucleotide
gaccatagcacact

SEQ ID NO: 1688 - DNA, 14 bp, Artificial
  Synthesized antisense oligonucleotide
ggatattggcactg

SEQ ID NO: 1689 - DNA, 14 bp, Artificial
  Synthesized antisense oligonucleotide
cctggatattggca

SEQ ID NO: 1690 - DNA, 14 bp, Artificial
  Synthesized antisense oligonucleotide
gctcccaaagatct

SEQ ID NO: 1691 - DNA, 14 bp, Artificial
  Synthesized antisense oligonucleotide
cccatcaaagctct

SEQ ID NO: 1692 - DNA, 14 bp, Artificial
  Synthesized antisense oligonucleotide
caaacacttggagc

SEQ ID NO: 1693 - DNA, 16 bp, Artificial
  Synthesized antisense oligonucleotide
gtctcaaacacttgga

SEQ ID NO: 1694 - DNA, 16 bp, Artificial
  Synthesized antisense oligonucleotide
gagtctcaaacacttg

SEQ ID NO: 1695 - DNA, 16 bp, Artificial
  Synthesized antisense oligonucleotide
gtaacctgtgatctct

SEQ ID NO: 1696 - DNA, 14 bp, Artificial
  Synthesized antisense oligonucleotide
ggtaacctgtgatc

SEQ ID NO: 1697 - DNA, 16 bp, Artificial
  Synthesized antisense oligonucleotide
gtataggtaacctgtg

SEQ ID NO: 1698 - DNA, 18 bp, Artificial
  Synthesized antisense oligonucleotide
tgagatgtataggtaacc

SEQ ID NO: 1699 - DNA, 16 bp, Artificial
  Synthesized antisense oligonucleotide
tgctgagatgtatagg

SEQ ID NO: 1700 - DNA, 14 bp, Artificial
  Synthesized antisense oligonucleotide
ccatgctgagatgt

SEQ ID NO: 1701 - DNA, 14 bp, Artificial
  Synthesized antisense oligonucleotide
ggattacttgcagg

SEQ ID NO: 1702 - DNA, 16 bp, Artificial
  Synthesized antisense oligonucleotide
tgttatggtggatgag

SEQ ID NO: 1703 - DNA, 14 bp, Artificial
  Synthesized antisense oligonucleotide
ggtgttatggtgga

SEQ ID NO: 1704 - DNA, 14 bp, Artificial
  Synthesized antisense oligonucleotide
gcagttgacacact

SEQ ID NO: 1705 - DNA, 14 bp, Artificial
  Synthesized antisense oligonucleotide
agtactcggcattc

SEQ ID NO: 1706 - DNA, 16 bp, Artificial
  Synthesized antisense oligonucleotide
cattcacatactccct

SEQ ID NO: 1707 - DNA, 16 bp, Artificial
  Synthesized antisense oligonucleotide
tccaaaacaggtcact

SEQ ID NO: 1708 - DNA, 14 bp, Artificial
  Synthesized antisense oligonucleotide
ggtccttatagtgg

SEQ ID NO: 1709 - DNA, 14 bp, Artificial
  Synthesized antisense oligonucleotide
cagaatgccaacca

SEQ ID NO: 1710 - DNA, 14 bp, Artificial
  Synthesized antisense oligonucleotide
acgagaatgccaac

SEQ ID NO: 1711 - DNA, 14 bp, Artificial
  Synthesized antisense oligonucleotide
gatcccaaagacca

SEQ ID NO: 1712 - DNA, 14 bp, Artificial
  Synthesized antisense oligonucleotide
tcgcttgatgagga

SEQ ID NO: 1713 - DNA, 14 bp, Artificial
  Synthesized antisense oligonucleotide
catcgtgtacttcc

SEQ ID NO: 1714 - DNA, 14 bp, Artificial
  Synthesized antisense oligonucleotide
gcatcgtgtacttc

SEQ ID NO: 1715 - DNA, 14 bp, Artificial
  Synthesized antisense oligonucleotide
actgtgccaaaagc

SEQ ID NO: 1716 - DNA, 14 bp, Artificial
  Synthesized antisense oligonucleotide
cttgtagactgtgc

SEQ ID NO: 1717 - DNA, 14 bp, Artificial
  Synthesized antisense oligonucleotide
cccttgtagactgt

SEQ ID NO: 1718 - DNA, 16 bp, Artificial
  Synthesized antisense oligonucleotide
tcaacactttgatggc

SEQ ID NO: 1719 - DNA, 14 bp, Artificial
  Synthesized antisense oligonucleotide
ccctcaacactttg

SEQ ID NO: 1720 - DNA, 16 bp, Artificial
  Synthesized antisense oligonucleotide
gtgttttccctcaaca

SEQ ID NO: 1721 - DNA, 16 bp, Artificial
  Synthesized antisense oligonucleotide
gtatgcttcgtctaag

SEQ ID NO: 1722 - DNA, 14 bp, Artificial
  Synthesized antisense oligonucleotide
cgtatgcttcgtct

SEQ ID NO: 1723 - DNA, 14 bp, Artificial
  Synthesized antisense oligonucleotide
ccatcacgtatgct

SEQ ID NO: 1724 - DNA, 14 bp, Artificial
  Synthesized antisense oligonucleotide
gcataagctgtgtc

SEQ ID NO: 1725 - DNA, 14 bp, Artificial
  Synthesized antisense oligonucleotide
catggtctaagagg

SEQ ID NO: 1726 - DNA, 16 bp, Artificial
  Synthesized antisense oligonucleotide
caatctgcatacacca

SEQ ID NO: 1727 - DNA, 14 bp, Artificial
  Synthesized antisense oligonucleotide
ggcaatctgcatac

SEQ ID NO: 1728 - DNA, 14 bp, Artificial
  Synthesized antisense oligonucleotide
ctgtctcgtcaatg

SEQ ID NO: 1729 - DNA, 16 bp, Artificial
  Synthesized antisense oligonucleotide
cataactccacacatc

SEQ ID NO: 1730 - DNA, 16 bp, Artificial
  Synthesized antisense oligonucleotide
agtcacaccataactc

SEQ ID NO: 1731 - DNA, 16 bp, Artificial
  Synthesized antisense oligonucleotide
acagtcacaccataac

SEQ ID NO: 1732 - DNA, 14 bp, Artificial
  Synthesized antisense oligonucleotide
ccccaaaagtcatc

SEQ ID NO: 1733 - DNA, 14 bp, Artificial
  Synthesized antisense oligonucleotide
tcgtaaggtttggc

SEQ ID NO: 1734 - DNA, 14 bp, Artificial
  Synthesized antisense oligonucleotide
gatcccatcgtaag

SEQ ID NO: 1735 - DNA, 14 bp, Artificial
  Synthesized antisense oligonucleotide
caatggtgcagatg

SEQ ID NO: 1736 - DNA, 14 bp, Artificial
  Synthesized antisense oligonucleotide
gacatcaatggtgc

SEQ ID NO: 1737 - DNA, 16 bp, Artificial
  Synthesized antisense oligonucleotide
gtagacatcaatggtg

SEQ ID NO: 1738 - DNA, 18 bp, Artificial
  Synthesized antisense oligonucleotide
catgatcatgtagacatc

SEQ ID NO: 1739 - DNA, 16 bp, Artificial
  Synthesized antisense oligonucleotide
ccatgatcatgtagac

SEQ ID NO: 1740 - DNA, 18 bp, Artificial
  Synthesized antisense oligonucleotide
catttgaccatgatcatg

SEQ ID NO: 1741 - DNA, 16 bp, Artificial
  Synthesized antisense oligonucleotide
ccaacatttgaccatg

SEQ ID NO: 1742 - DNA, 18 bp, Artificial
  Synthesized antisense oligonucleotide
tcatccaacatttgacca

SEQ ID NO: 1743 - DNA, 18 bp, Artificial
  Synthesized antisense oligonucleotide
gagtcaatcatccaacat

SEQ ID NO: 1744 - DNA, 16 bp, Artificial
  Synthesized antisense oligonucleotide
cagagtcaatcatcca

SEQ ID NO: 1745 - DNA, 14 bp, Artificial
  Synthesized antisense oligonucleotide
ccgacattcagagt

SEQ ID NO: 1746 - DNA, 16 bp, Artificial
  Synthesized antisense oligonucleotide
gaattcagacaccaac

SEQ ID NO: 1747 - DNA, 14 bp, Artificial
  Synthesized antisense oligonucleotide
gatgaccacaaagc

SEQ ID NO: 1748 - DNA, 16 bp, Artificial
  Synthesized antisense oligonucleotide
ccatcaaatacatcgg

SEQ ID NO: 1749 - DNA, 18 bp, Artificial
  Synthesized antisense oligonucleotide
tcaccatcaaatacatcg

SEQ ID NO: 1750 - DNA, 14 bp, Artificial
  Synthesized antisense oligonucleotide
caacgtagccatca

SEQ ID NO: 1751 - DNA, 14 bp, Artificial
  Synthesized antisense oligonucleotide
acgtctttgacgac

SEQ ID NO: 1752 - DNA, 18 bp, Artificial
  Synthesized antisense oligonucleotide
caaaaacgtctttgacga

SEQ ID NO: 1753 - DNA, 16 bp, Artificial
  Synthesized antisense oligonucleotide
ggcaaaaacgtctttg

SEQ ID NO: 1754 - DNA, 16 bp, Artificial
  Synthesized antisense oligonucleotide
caaaggcaaaaacgtc

SEQ ID NO: 1755 - DNA, 14 bp, Artificial
  Synthesized antisense oligonucleotide
gtgtcaagtactcg

SEQ ID NO: 1756 - DNA, 16 bp, Artificial
  Synthesized antisense oligonucleotide
gtaatagaggttgtcg

SEQ ID NO: 1757 - DNA, 14 bp, Artificial
  Synthesized antisense oligonucleotide
cccagtaatagagg

SEQ ID NO: 1758 - DNA, 14 bp, Artificial
  Synthesized antisense oligonucleotide
catggtgctcactg

SEQ ID NO: 1759 - DNA, 14 bp, Artificial
  Synthesized antisense oligonucleotide
gtgcctgtacgtac

SEQ ID NO: 1760 - DNA, 14 bp, Artificial
  Synthesized antisense oligonucleotide
tgcaggtggatagt

SEQ ID NO: 1761 - DNA, 18 bp, Artificial
  Synthesized antisense oligonucleotide
catgtcgatagtcttgca

SEQ ID NO: 1762 - DNA, 14 bp, Artificial
  Synthesized antisense oligonucleotide
gtcgatagtcttgc

SEQ ID NO: 1763 - DNA, 14 bp, Artificial
  Synthesized antisense oligonucleotide
ccatgtcgatagtc

SEQ ID NO: 1764 - DNA, 14 bp, Artificial
  Synthesized antisense oligonucleotide
ctccatgtcgatag

SEQ ID NO: 1765 - DNA, 14 bp, Artificial
  Synthesized antisense oligonucleotide
cttggacaggatct

SEQ ID NO: 1766 - DNA, 14 bp, Artificial
  Synthesized antisense oligonucleotide
tgctgttgtacagg

SEQ ID NO: 1767 - DNA, 14 bp, Artificial
  Synthesized antisense oligonucleotide
gtgctgttgtacag

SEQ ID NO: 1768 - DNA, 14 bp, Artificial
  Synthesized antisense oligonucleotide
ttggcgtagtagtc

SEQ ID NO: 1769 - DNA, 14 bp, Artificial
  Synthesized antisense oligonucleotide
tccaccattagcac

SEQ ID NO: 1770 - DNA, 14 bp, Artificial
  Synthesized antisense oligonucleotide
gatttcgttgtggg

SEQ ID NO: 1771 - DNA, 18 bp, Artificial
  Synthesized antisense oligonucleotide
gtcatagatttcgttgtg

SEQ ID NO: 1772 - DNA, 16 bp, Artificial
  Synthesized antisense oligonucleotide
tgtactctgcttgaac

SEQ ID NO: 1773 - DNA, 14 bp, Artificial
  Synthesized antisense oligonucleotide
gtgtactctgcttg

SEQ ID NO: 1774 - DNA, 14 bp, Artificial
  Synthesized antisense oligonucleotide
tgctgtgtgtactc

SEQ ID NO: 1775 - DNA, 18 bp, Artificial
  Synthesized antisense oligonucleotide
ctgatgtgttgaagaaca

SEQ ID NO: 1776 - DNA, 16 bp, Artificial
  Synthesized antisense oligonucleotide
ctctgatgtgttgaag

SEQ ID NO: 1777 - DNA, 14 bp, Artificial
  Synthesized antisense oligonucleotide
gctctgatgtgttg

SEQ ID NO: 1778 - DNA, 14 bp, Artificial
  Synthesized antisense oligonucleotide
gagctctgatgtgt

SEQ ID NO: 1779 - DNA, 18 bp, Artificial
  Synthesized antisense oligonucleotide
cacttttaacttgagcct

SEQ ID NO: 1780 - DNA, 18 bp, Artificial
  Synthesized antisense oligonucleotide
ctccacttttaacttgag

SEQ ID NO: 1781 - DNA, 18 bp, Artificial
  Synthesized antisense oligonucleotide
tgctgtatttctggtaca

SEQ ID NO: 1782 - DNA, 14 bp, Artificial
  Synthesized antisense oligonucleotide
ccaggaattgttgc

SEQ ID NO: 1783 - DNA, 14 bp, Artificial
  Synthesized antisense oligonucleotide
ttgctgaggtatcg

SEQ ID NO: 1784 - DNA, 14 bp, Artificial
  Synthesized antisense oligonucleotide
gataaccactctgg

SEQ ID NO: 1785 - DNA, 18 bp, Artificial
  Synthesized antisense oligonucleotide
caaaagataaccactctg

SEQ ID NO: 1786 - DNA, 15 bp, Artificial
  Synthesized antisense oligonucleotide
cggtgacatcaaaag

SEQ ID NO: 1787 - DNA, 14 bp, Artificial
  Synthesized antisense oligonucleotide
cctcaatttcccct

SEQ ID NO: 1788 - DNA, 14 bp, Artificial
  Synthesized antisense oligonucleotide
gttatccctgctgt

SEQ ID NO: 1789 - DNA, 14 bp, Artificial
  Synthesized antisense oligonucleotide
gcagtgtgttatcc

SEQ ID NO: 1790 - DNA, 14 bp, Artificial
  Synthesized antisense oligonucleotide
gatgtccacttgca

SEQ ID NO: 1791 - DNA, 14 bp, Artificial
  Synthesized antisense oligonucleotide
tagtgaacccgttg

SEQ ID NO: 1792 - DNA, 14 bp, Artificial
  Synthesized antisense oligonucleotide
tgccatgaatggtg

SEQ ID NO: 1793 - DNA, 16 bp, Artificial
  Synthesized antisense oligonucleotide
gttcatgccatgaatg

SEQ ID NO: 1794 - DNA, 14 bp, Artificial
  Synthesized antisense oligonucleotide
catgagaagcagga

SEQ ID NO: 1795 - DNA, 14 bp, Artificial
  Synthesized antisense oligonucleotide
gctttgcagatgct

SEQ ID NO: 1796 - DNA, 14 bp, Artificial
  Synthesized antisense oligonucleotide
gagctttgcagatg

SEQ ID NO: 1797 - DNA, 14 bp, Artificial
  Synthesized antisense oligonucleotide
tagttggtgtccag

SEQ ID NO: 1798 - DNA, 16 bp, Artificial
  Synthesized antisense oligonucleotide
ctgaagcaatagttgg

SEQ ID NO: 1799 - DNA, 18 bp, Artificial
  Synthesized antisense oligonucleotide
agctgaagcaatagttgg

SEQ ID NO: 1800 - DNA, 14 bp, Artificial
  Synthesized antisense oligonucleotide
ggagctgaagcaat

SEQ ID NO: 1801 - DNA, 14 bp, Artificial
  Synthesized antisense oligonucleotide
caatgtacagctgc

SEQ ID NO: 1802 - DNA, 16 bp, Artificial
  Synthesized antisense oligonucleotide
ggaagtcaatgtacag

SEQ ID NO: 1803 - DNA, 15 bp, Artificial
  Synthesized antisense oligonucleotide
cggaagtcaatgtac

SEQ ID NO: 1804 - DNA, 14 bp, Artificial
  Synthesized antisense oligonucleotide
gcggaagtcaatgt

SEQ ID NO: 1805 - DNA, 14 bp, Artificial
  Synthesized antisense oligonucleotide
agttggcatggtag

SEQ ID NO: 1806 - DNA, 14 bp, Artificial
  Synthesized antisense oligonucleotide
gcagaagttggcat

SEQ ID NO: 1807 - DNA, 14 bp, Artificial
  Synthesized antisense oligonucleotide
ctccaaatgtaggg

SEQ ID NO: 1808 - DNA, 14 bp, Artificial
  Synthesized antisense oligonucleotide
accttgctgtactg

SEQ ID NO: 1809 - DNA, 14 bp, Artificial
  Synthesized antisense oligonucleotide
tgctggttgtacag

SEQ ID NO: 1810 - DNA, 14 bp, Artificial
  Synthesized antisense oligonucleotide
ggttatgctggttg

SEQ ID NO: 1811 - DNA, 14 bp, Artificial
  Synthesized antisense oligonucleotide
gtagtacacgatgg

SEQ ID NO: 1812 - DNA, 14 bp, Artificial
  Synthesized antisense oligonucleotide
cgtagtacacgatg

SEQ ID NO: 1813 - DNA, 14 bp, Artificial
  Synthesized antisense oligonucleotide
cacgtagtacacga

SEQ ID NO: 1814 - DNA, 14 bp, Artificial
  Synthesized antisense oligonucleotide
catgttggacagct

SEQ ID NO: 1815 - DNA, 14 bp, Artificial
  Synthesized antisense oligonucleotide
gcacgatcatgttg

SEQ ID NO: 1816 - DNA, 14 bp, Artificial
  Synthesized antisense oligonucleotide
cacacagtagtgca

SEQ ID NO: 1817 - DNA, 14 bp, Artificial
  Synthesized antisense oligonucleotide
gatcagaaaagcgc

SEQ ID NO: 1818 - DNA, 14 bp, Artificial
  Synthesized antisense oligonucleotide
accgtgaccagatg

SEQ ID NO: 1819 - DNA, 14 bp, Artificial
  Synthesized antisense oligonucleotide
gtagacaggctgag

SEQ ID NO: 1820 - DNA, 14 bp, Artificial
  Synthesized antisense oligonucleotide
tatcgagtgtgctg

SEQ ID NO: 1821 - DNA, 14 bp, Artificial
  Synthesized antisense oligonucleotide
ttgcgcatgaactg

SEQ ID NO: 1822 - DNA, 14 bp, Artificial
  Synthesized antisense oligonucleotide
ttgctcaggatctg

SEQ ID NO: 1823 - DNA, 14 bp, Artificial
  Synthesized antisense oligonucleotide
actggtgagcttca

SEQ ID NO: 1824 - DNA, 14 bp, Artificial
  Synthesized antisense oligonucleotide
gctcaggatagtct

SEQ ID NO: 1825 - DNA, 18 bp, Artificial
  Synthesized antisense oligonucleotide
tgtagatggaaatcacct

SEQ ID NO: 1826 - DNA, 14 bp, Artificial
  Synthesized antisense oligonucleotide
tggtgctgttgtag

SEQ ID NO: 1827 - DNA, 14 bp, Artificial
  Synthesized antisense oligonucleotide
ttctcctggagcaa

SEQ ID NO: 1828 - DNA, 14 bp, Artificial
  Synthesized antisense oligonucleotide
tactcttcgtcgct

SEQ ID NO: 1829 - DNA, 14 bp, Artificial
  Synthesized antisense oligonucleotide
cttggcgtagtact

SEQ ID NO: 1830 - DNA, 18 bp, Artificial
  Synthesized antisense oligonucleotide
cggcatgtctattttgta

SEQ ID NO: 1831 - DNA, 14 bp, Artificial
  Synthesized antisense oligonucleotide
cgggatggcatttt

SEQ ID NO: 1832 - DNA, 14 bp, Artificial
  Synthesized antisense oligonucleotide
ctgtagaaagtggg

SEQ ID NO: 1833 - DNA, 18 bp, Artificial
  Synthesized antisense oligonucleotide
acaattctgaagtagggt

SEQ ID NO: 1834 - DNA, 18 bp, Artificial
  Synthesized antisense oligonucleotide
attgctgagacgtcaaat

SEQ ID NO: 1835 - DNA, 14 bp, Artificial
  Synthesized antisense oligonucleotide
tctccattgctgag

SEQ ID NO: 1836 - DNA, 18 bp, Artificial
  Synthesized antisense oligonucleotide
tcaccaaattggaagcat

SEQ ID NO: 1837 - DNA, 14 bp, Artificial
  Synthesized antisense oligonucleotide
ctctgaactctgct

SEQ ID NO: 1838 - DNA, 18 bp, Artificial
  Synthesized antisense oligonucleotide
aacgaaagactctgaact

SEQ ID NO: 1839 - DNA, 14 bp, Artificial
  Synthesized antisense oligonucleotide
tgggttctgcaaac

SEQ ID NO: 1840 - DNA, 14 bp, Artificial
  Synthesized antisense oligonucleotide
ctggcttttgggtt

SEQ ID NO: 1841 - DNA, 14 bp, Artificial
  Synthesized antisense oligonucleotide
gttgttcaggcact

SEQ ID NO: 1842 - DNA, 18 bp, Artificial
  Synthesized antisense oligonucleotide
tctgatatagctcaatcc

SEQ ID NO: 1843 - DNA, 18 bp, Artificial
  Synthesized antisense oligonucleotide
tctttggacttgagaatc

SEQ ID NO: 1844 - DNA, 14 bp, Artificial
  Synthesized antisense oligonucleotide
tgggttggagatgt

SEQ ID NO: 1845 - DNA, 14 bp, Artificial
  Synthesized antisense oligonucleotide
tgctgtcgatgtag

SEQ ID NO: 1846 - DNA, 16 bp, Artificial
  Synthesized antisense oligonucleotide
acaactttgctgtcga

SEQ ID NO: 1847 - DNA, 14 bp, Artificial
  Synthesized antisense oligonucleotide
attcgccttctgct

SEQ ID NO: 1848 - DNA, 14 bp, Artificial
  Synthesized antisense oligonucleotide
gaaggagagccatt

SEQ ID NO: 1849 - DNA, 16 bp, Artificial
  Synthesized antisense oligonucleotide
tcagttacatcgaagg

SEQ ID NO: 1850 - DNA, 18 bp, Artificial
  Synthesized antisense oligonucleotide
tgaagccattcatgaaca

SEQ ID NO: 1851 - DNA, 16 bp, Artificial
  Synthesized antisense oligonucleotide
tcctgtctttatggtg

SEQ ID NO: 1852 - DNA, 14 bp, Artificial
  Synthesized antisense oligonucleotide
aaatcccaggttcc

SEQ ID NO: 1853 - DNA, 18 bp, Artificial
  Synthesized antisense oligonucleotide
ggacagtgtaagcttatt

SEQ ID NO: 1854 - DNA, 16 bp, Artificial
  Synthesized antisense oligonucleotide
gtacaaaagtgcagca

SEQ ID NO: 1855 - DNA, 18 bp, Artificial
  Synthesized antisense oligonucleotide
tagatggtacaaaagtgc

SEQ ID NO: 1856 - DNA, 20 bp, Artificial
  Synthesized antisense oligonucleotide
cacttttatttgggatgatg

SEQ ID NO: 1857 - DNA, 18 bp, Artificial
  Synthesized antisense oligonucleotide
gcaaatcttgcttctagt

SEQ ID NO: 1858 - DNA, 14 bp, Artificial
  Synthesized antisense oligonucleotide
gtgccatcaatacc

SEQ ID NO: 1859 - DNA, 14 bp, Artificial
  Synthesized antisense oligonucleotide
ggtatatgtggagg

SEQ ID NO: 1860 - DNA, 14 bp, Artificial
  Synthesized antisense oligonucleotide
tctgatcaccactg

SEQ ID NO: 1861 - DNA, 18 bp, Artificial
  Synthesized antisense oligonucleotide
tcctagtggactttatag

SEQ ID NO: 1862 - DNA, 16 bp, Artificial
  Synthesized antisense oligonucleotide
tttttcctagtggact

SEQ ID NO: 1863 - DNA, 16 bp, Artificial
  Synthesized antisense oligonucleotide
caataacattagcagg

SEQ ID NO: 1864 - DNA, 14 bp, Artificial
  Synthesized antisense oligonucleotide
aagtctgtaggagg

SEQ ID NO: 1865 - DNA, 16 bp, Artificial
  Synthesized antisense oligonucleotide
tctgttgtgactcaag

SEQ ID NO: 1866 - DNA, 14 bp, Artificial
  Synthesized antisense oligonucleotide
gttggtctgttgtg

SEQ ID NO: 1867 - DNA, 14 bp, Artificial
  Synthesized antisense oligonucleotide
caaagcacgcttct

SEQ ID NO: 1868 - DNA, 18 bp, Artificial
  Synthesized antisense oligonucleotide
tttctaaagcaataggcc

SEQ ID NO: 1869 - DNA, 16 bp, Artificial
  Synthesized antisense oligonucleotide
gcaattatcctgcaca

SEQ ID NO: 1870 - DNA, 14 bp, Artificial
  Synthesized antisense oligonucleotide
acgtaggcagcaat

SEQ ID NO: 1871 - DNA, 18 bp, Artificial
  Synthesized antisense oligonucleotide
atcaatgtaaagtggacg

SEQ ID NO: 1872 - DNA, 14 bp, Artificial
  Synthesized antisense oligonucleotide
ctagatccctcttg

SEQ ID NO: 1873 - DNA, 14 bp, Artificial
  Synthesized antisense oligonucleotide
ccatttccacccta

SEQ ID NO: 1874 - DNA, 14 bp, Artificial
  Synthesized antisense oligonucleotide
tgggttcgtgtatc

SEQ ID NO: 1875 - DNA, 14 bp, Artificial
  Synthesized antisense oligonucleotide
tggcattgtaccct

SEQ ID NO: 1876 - DNA, 14 bp, Artificial
  Synthesized antisense oligonucleotide
tccagcacagaagt

SEQ ID NO: 1877 - DNA, 16 bp, Artificial
  Synthesized antisense oligonucleotide
ataaatacgggcatgc

SEQ ID NO: 1878 - DNA, 14 bp, Artificial
  Synthesized antisense oligonucleotide
agtgtctgaactcc

SEQ ID NO: 1879 - DNA, 14 bp, Artificial
  Synthesized antisense oligonucleotide
tgtgctgagtgtct

SEQ ID NO: 1880 - DNA, 14 bp, Artificial
  Synthesized antisense oligonucleotide
ataagctcaggacc

SEQ ID NO: 1881 - DNA, 14 bp, Artificial
  Synthesized antisense oligonucleotide
aggagaagcagatg

SEQ ID NO: 1882 - DNA, 14 bp, Artificial
  Synthesized antisense oligonucleotide
agcaaggagaagca

SEQ ID NO: 1883 - DNA, 14 bp, Artificial
  Synthesized antisense oligonucleotide
aatcttgggacacg

SEQ ID NO: 1884 - DNA, 18 bp, Artificial
  Synthesized antisense oligonucleotide
tagagaatggttagaggt

SEQ ID NO: 1885 - DNA, 18 bp, Artificial
  Synthesized antisense oligonucleotide
gttttgccaatgtagtag

SEQ ID NO: 1886 - DNA, 14 bp, Artificial
  Synthesized antisense oligonucleotide
cttgggtgttttgc

SEQ ID NO: 1887 - DNA, 16 bp, Artificial
  Synthesized antisense oligonucleotide
gcaagactttacaatc

SEQ ID NO: 1888 - DNA, 18 bp, Artificial
  Synthesized antisense oligonucleotide
gcatttgcaagactttac

SEQ ID NO: 1889 - DNA, 18 bp, Artificial
  Synthesized antisense oligonucleotide
tttagctgcatttgcaag

SEQ ID NO: 1890 - DNA, 14 bp, Artificial
  Synthesized antisense oligonucleotide
gccacttttccaag

SEQ ID NO: 1891 - DNA, 14 bp, Artificial
  Synthesized antisense oligonucleotide
ttggtcttgccact

SEQ ID NO: 1892 - DNA, 14 bp, Artificial
  Synthesized antisense oligonucleotide
cagcacacagtagt

SEQ ID NO: 1893 - DNA, 14 bp, Artificial
  Synthesized antisense oligonucleotide
cgatagtcttgcag

SEQ ID NO: 1894 - DNA, 18 bp, Artificial
  Synthesized antisense oligonucleotide
ctttcaccaaattggaag

SEQ ID NO: 1895 - DNA, 15 bp, Artificial
  Synthesized antisense oligonucleotide
caccaaattggaagc

SEQ ID NO: 1896 - DNA, 16 bp, Artificial
  Synthesized antisense oligonucleotide
tcaccaaattggaagc

SEQ ID NO: 1897 - DNA, 14 bp, Artificial
  Synthesized antisense oligonucleotide
ctctggcttttggg

SEQ ID NO: 1898 - DNA, 16 bp, Artificial
  Synthesized antisense oligonucleotide
cggcatgtctattttg

SEQ ID NO: 1899 - DNA, 14 bp, Artificial
  Synthesized antisense oligonucleotide
cactacagacgagc

SEQ ID NO: 1900 - DNA, 15 bp, Artificial
  Synthesized antisense oligonucleotide
cgtgcactacagacg

SEQ ID NO: 1901 - DNA, 14 bp, Artificial
  Synthesized antisense oligonucleotide
ggaacagttcgtcc

SEQ ID NO: 1902 - DNA, 16 bp, Artificial
  Synthesized antisense oligonucleotide
gaacagttcgtccatg

SEQ ID NO: 1903 - DNA, 15 bp, Artificial
  Synthesized antisense oligonucleotide
ccagagtttcggttc

SEQ ID NO: 1904 - DNA, 15 bp, Artificial
  Synthesized antisense oligonucleotide
ctaggactgggacag

SEQ ID NO: 1905 - DNA, 13 bp, Artificial
  Synthesized antisense oligonucleotide
cgcacttgtagcg

SEQ ID NO: 1906 - DNA, 14 bp, Artificial
  Synthesized antisense oligonucleotide
ctcgcacttgtagc

SEQ ID NO: 1907 - DNA, 11 bp, Artificial
  Synthesized antisense oligonucleotide
gcacttgtagc

SEQ ID NO: 1908 - DNA, 14 bp, Artificial
  Synthesized antisense oligonucleotide
gcgcactgtccctg

SEQ ID NO: 1909 - DNA, 14 bp, Artificial
  Synthesized antisense oligonucleotide
ccagggagatgcgc

SEQ ID NO: 1910 - DNA, 13 bp, Artificial
  Synthesized antisense oligonucleotide
gccggtgaggagg

SEQ ID NO: 1911 - DNA, 13 bp, Artificial
  Synthesized antisense oligonucleotide
ccggtgaggaggg

SEQ ID NO: 1912 - DNA, 13 bp, Artificial
  Synthesized antisense oligonucleotide
cggttcactcggc

SEQ ID NO: 1913 - DNA, 16 bp, Artificial
  Synthesized antisense oligonucleotide
gagtttcggttcactc

SEQ ID NO: 1914 - DNA, 16 bp, Artificial
  Synthesized antisense oligonucleotide
ggcacgattgtcaaag

SEQ ID NO: 1915 - DNA, 14 bp, Artificial
  Synthesized antisense oligonucleotide
caggcgtcaccccc

SEQ ID NO: 1916 - DNA, 13 bp, Artificial
  Synthesized antisense oligonucleotide
gcaggcgtcaccc

SEQ ID NO: 1917 - DNA, 13 bp, Artificial
  Synthesized antisense oligonucleotide
ctccctcctaagc

SEQ ID NO: 1918 - DNA, 13 bp, Artificial
  Synthesized antisense oligonucleotide
ccctcctaagcgg

SEQ ID NO: 1919 - DNA, 14 bp, Artificial
  Synthesized antisense oligonucleotide
cgagtccgcgttcg

SEQ ID NO: 1920 - DNA, 15 bp, Artificial
  Synthesized antisense oligonucleotide
catcttctgccattc

SEQ ID NO: 1921 - DNA, 15 bp, Artificial
  Synthesized antisense oligonucleotide
gtgttttcccaccag

SEQ ID NO: 1922 - DNA, 16 bp, Artificial
  Synthesized antisense oligonucleotide
ggttttggttcactag

SEQ ID NO: 1923 - DNA, 16 bp, Artificial
  Synthesized antisense oligonucleotide
gcatcttcacgtctcc

SEQ ID NO: 1924 - DNA, 16 bp, Artificial
  Synthesized antisense oligonucleotide
cttcacgtctcctgtc

SEQ ID NO: 1925 - DNA, 14 bp, Artificial
  Synthesized antisense oligonucleotide
gtcaccgcgtagtc

SEQ ID NO: 1926 - DNA, 15 bp, Artificial
  Synthesized antisense oligonucleotide
caaataggcaaggtc

SEQ ID NO: 1927 - DNA, 16 bp, Artificial
  Synthesized antisense oligonucleotide
cttgcaaataggcaag

SEQ ID NO: 1928 - DNA, 14 bp, Artificial
  Synthesized antisense oligonucleotide
tgcttgcaaatagg

SEQ ID NO: 1929 - DNA, 15 bp, Artificial
  Synthesized antisense oligonucleotide
ctgcttgcaaatagg

SEQ ID NO: 1930 - DNA, 14 bp, Artificial
  Synthesized antisense oligonucleotide
gcaggtggatattt

SEQ ID NO: 1931 - DNA, 13 bp, Artificial
  Synthesized antisense oligonucleotide
ctgctgttggcag

SEQ ID NO: 1932 - DNA, 15 bp, Artificial
  Synthesized antisense oligonucleotide
cactagtttccaagt

SEQ ID NO: 1933 - DNA, 15 bp, Artificial
  Synthesized antisense oligonucleotide
gttttggttcactag

SEQ ID NO: 1934 - DNA, 17 bp, Artificial
  Synthesized antisense oligonucleotide
ctttgatttcaggatag

SEQ ID NO: 1935 - DNA, 17 bp, Artificial
  Synthesized antisense oligonucleotide
gcacttcttctttatct

SEQ ID NO: 1936 - DNA, 15 bp, Artificial
  Synthesized antisense oligonucleotide
ccaagtcagatttcc

SEQ ID NO: 1937 - DNA, 18 bp, Artificial
  Synthesized antisense oligonucleotide
gtttccaagtcagatttc

SEQ ID NO: 1938 - DNA, 15 bp, Artificial
  Synthesized antisense oligonucleotide
ggttcactagtttcc

SEQ ID NO: 1939 - DNA, 16 bp, Artificial
  Synthesized antisense oligonucleotide
ggttttggttcactag

SEQ ID NO: 1940 - DNA, 15 bp, Artificial
  Synthesized antisense oligonucleotide
ccgaaaaattgggca

SEQ ID NO: 1941 - DNA, 13 bp, Artificial
  Synthesized antisense oligonucleotide
ccgaaaaattggg

SEQ ID NO: 1942 - DNA, 16 bp, Artificial
  Synthesized antisense oligonucleotide
ctatccgaaaaattgg

SEQ ID NO: 1943 - DNA, 17 bp, Artificial
  Synthesized antisense oligonucleotide
gttgataatgtcatcag

SEQ ID NO: 1944 - DNA, 17 bp, Artificial
  Synthesized antisense oligonucleotide
ctcatgttgataatgtc

SEQ ID NO: 1945 - DNA, 14 bp, Artificial
  Synthesized antisense oligonucleotide
ctgtcaccgcgtag

SEQ ID NO: 1946 - DNA, 15 bp, Artificial
  Synthesized antisense oligonucleotide
cgtctcctgtcaccg

SEQ ID NO: 1947 - DNA, 14 bp, Artificial
  Synthesized antisense oligonucleotide
cttcacgtctcctg

SEQ ID NO: 1948 - DNA, 17 bp, Artificial
  Synthesized antisense oligonucleotide
gagaactttatcatgtc

SEQ ID NO: 1949 - DNA, 13 bp, Artificial
  Synthesized antisense oligonucleotide
gctatatgcaggg

SEQ ID NO: 1950 - DNA, 18 bp, Artificial
  Synthesized antisense oligonucleotide
ccagctgctatatgcagg

SEQ ID NO: 1951 - DNA, 16 bp, Artificial
  Synthesized antisense oligonucleotide
aggctaaattttgcct

SEQ ID NO: 1952 - DNA, 14 bp, Artificial
  Synthesized antisense oligonucleotide
ggctaaattttgcc

SEQ ID NO: 1953 - DNA, 17 bp, Artificial
  Synthesized antisense oligonucleotide
ggctaaattttgccttc

SEQ ID NO: 1954 - DNA, 17 bp, Artificial
  Synthesized antisense oligonucleotide
gcaggctaaattttgcc

SEQ ID NO: 1955 - DNA, 14 bp, Artificial
  Synthesized antisense oligonucleotide
gagttacccaagcg

SEQ ID NO: 1956 - DNA, 16 bp, Artificial
  Synthesized antisense oligonucleotide
cagagttacccaagcg

SEQ ID NO: 1957 - DNA, 14 bp, Artificial
  Synthesized antisense oligonucleotide
cagagttacccaag

SEQ ID NO: 1958 - DNA, 15 bp, Artificial
  Synthesized antisense oligonucleotide
acagagttacccaag

SEQ ID NO: 1959 - DNA, 14 bp, Artificial
  Synthesized antisense oligonucleotide
ggtgcaaaacagag

SEQ ID NO: 1960 - DNA, 15 bp, Artificial
  Synthesized antisense oligonucleotide
ctaggtgcaaaacag

SEQ ID NO: 1961 - DNA, 18 bp, Artificial
  Synthesized antisense oligonucleotide
gagaactttatcatgtcc

SEQ ID NO: 1962 - DNA, 14 bp, Artificial
  Synthesized antisense oligonucleotide
gctagatgaatggc

SEQ ID NO: 1963 - DNA, 15 bp, Artificial
  Synthesized antisense oligonucleotide
gcaaacatggcaggc

SEQ ID NO: 1964 - DNA, 14 bp, Artificial
  Synthesized antisense oligonucleotide
cagcaaacatggca

SEQ ID NO: 1965 - DNA, 14 bp, Artificial
  Synthesized antisense oligonucleotide
gcagcaaacatggc

SEQ ID NO: 1966 - DNA, 14 bp, Artificial
  Synthesized antisense oligonucleotide
agcagcaaacatgg

SEQ ID NO: 1967 - DNA, 14 bp, Artificial
  Synthesized antisense oligonucleotide
cagcagcaaacatg

SEQ ID NO: 1968 - DNA, 14 bp, Artificial
  Synthesized antisense oligonucleotide
agcagcagcaaaca

SEQ ID NO: 1969 - DNA, 15 bp, Artificial
  Synthesized antisense oligonucleotide
cagcagcagcaaaca

SEQ ID NO: 1970 - DNA, 14 bp, Artificial
  Synthesized antisense oligonucleotide
cagcagcagcaaac

SEQ ID NO: 1971 - DNA, 14 bp, Artificial
  Synthesized antisense oligonucleotide
caccagcagcagca

SEQ ID NO: 1972 - DNA, 14 bp, Artificial
  Synthesized antisense oligonucleotide
gcattgacgtcagc

SEQ ID NO: 1973 - DNA, 15 bp, Artificial
  Synthesized antisense oligonucleotide
gatgttgtcgtgctc

SEQ ID NO: 1974 - DNA, 17 bp, Artificial
  Synthesized antisense oligonucleotide
tgagatgttgtcgtgct

SEQ ID NO: 1975 - DNA, 15 bp, Artificial
  Synthesized antisense oligonucleotide
tgagatgttgtcgtg

SEQ ID NO: 1976 - DNA, 15 bp, Artificial
  Synthesized antisense oligonucleotide
gccaatgagatgttg

SEQ ID NO: 1977 - DNA, 14 bp, Artificial
  Synthesized antisense oligonucleotide
ctgccaatgagatg

SEQ ID NO: 1978 - DNA, 14 bp, Artificial
  Synthesized antisense oligonucleotide
cacatgggcatcac

SEQ ID NO: 1979 - DNA, 14 bp, Artificial
  Synthesized antisense oligonucleotide
tgtccacatgggca

SEQ ID NO: 1980 - DNA, 14 bp, Artificial
  Synthesized antisense oligonucleotide
gtactgtccacatg

SEQ ID NO: 1981 - DNA, 14 bp, Artificial
  Synthesized antisense oligonucleotide
cagctgctatatgc

SEQ ID NO: 1982 - DNA, 14 bp, Artificial
  Synthesized antisense oligonucleotide
gttctccaccaggg

SEQ ID NO: 1983 - DNA, 14 bp, Artificial
  Synthesized antisense oligonucleotide
agttctccaccagg

SEQ ID NO: 1984 - DNA, 16 bp, Artificial
  Synthesized antisense oligonucleotide
caaagttctccaccag

SEQ ID NO: 1985 - DNA, 16 bp, Artificial
  Synthesized antisense oligonucleotide
ccaagagtcatccagg

SEQ ID NO: 1986 - DNA, 14 bp, Artificial
  Synthesized antisense oligonucleotide
cccaagagtcatcc

SEQ ID NO: 1987 - DNA, 16 bp, Artificial
  Synthesized antisense oligonucleotide
cctgcattttcccaag

SEQ ID NO: 1988 - DNA, 14 bp, Artificial
  Synthesized antisense oligonucleotide
tcctgcattttccc

SEQ ID NO: 1989 - DNA, 15 bp, Artificial
  Synthesized antisense oligonucleotide
gccatatctagaggc

SEQ ID NO: 1990 - DNA, 14 bp, Artificial
  Synthesized antisense oligonucleotide
tcacatcttcagcc

SEQ ID NO: 1991 - DNA, 16 bp, Artificial
  Synthesized antisense oligonucleotide
gcttcacatcttcagc

SEQ ID NO: 1992 - DNA, 15 bp, Artificial
  Synthesized antisense oligonucleotide
cagcttcacatcttc

SEQ ID NO: 1993 - DNA, 17 bp, Artificial
  Synthesized antisense oligonucleotide
gtaacttatacagctgc

SEQ ID NO: 1994 - DNA, 15 bp, Artificial
  Synthesized antisense oligonucleotide
ccagtttttgtctgg

SEQ ID NO: 1995 - DNA, 14 bp, Artificial
  Synthesized antisense oligonucleotide
ccatttgtctcagg

SEQ ID NO: 1996 - DNA, 14 bp, Artificial
  Synthesized antisense oligonucleotide
gtgtagcccatttg

SEQ ID NO: 1997 - DNA, 14 bp, Artificial
  Synthesized antisense oligonucleotide
gcttcggtgtagcc

SEQ ID NO: 1998 - DNA, 18 bp, Artificial
  Synthesized antisense oligonucleotide
gatcacttcaattgcttc

SEQ ID NO: 1999 - DNA, 14 bp, Artificial
  Synthesized antisense oligonucleotide
cttgtggaggcagg

SEQ ID NO: 2000 - DNA, 14 bp, Artificial
  Synthesized antisense oligonucleotide
gctgccttgtggag

SEQ ID NO: 2001 - DNA, 18 bp, Artificial
  Synthesized antisense oligonucleotide
ctatttgctgccttgtgg

SEQ ID NO: 2002 - DNA, 14 bp, Artificial
  Synthesized antisense oligonucleotide
ggatgtctccacgc

SEQ ID NO: 2003 - DNA, 14 bp, Artificial
  Synthesized antisense oligonucleotide
ggaaggatgtctcc

SEQ ID NO: 2004 - DNA, 14 bp, Artificial
  Synthesized antisense oligonucleotide
tgcggaaggatgtc

SEQ ID NO: 2005 - DNA, 17 bp, Artificial
  Synthesized antisense oligonucleotide
gtttgcggaaggatgtc

SEQ ID NO: 2006 - DNA, 14 bp, Artificial
  Synthesized antisense oligonucleotide
gctgagtttgcgga

SEQ ID NO: 2007 - DNA, 16 bp, Artificial
  Synthesized antisense oligonucleotide
ggtaaagctgagtttg

SEQ ID NO: 2008 - DNA, 14 bp, Artificial
  Synthesized antisense oligonucleotide
tcggtaaagctgag

SEQ ID NO: 2009 - DNA, 15 bp, Artificial
  Synthesized antisense oligonucleotide
gactcggtaaagctg

SEQ ID NO: 2010 - DNA, 16 bp, Artificial
  Synthesized antisense oligonucleotide
agagactcggtaaagc

SEQ ID NO: 2011 - DNA, 16 bp, Artificial
  Synthesized antisense oligonucleotide
gaaattgtcagcaggc

SEQ ID NO: 2012 - DNA, 15 bp, Artificial
  Synthesized antisense oligonucleotide
gaaattgtcagcagg

SEQ ID NO: 2013 - DNA, 16 bp, Artificial
  Synthesized antisense oligonucleotide
ggaaattgtcagcagg

SEQ ID NO: 2014 - DNA, 15 bp, Artificial
  Synthesized antisense oligonucleotide
ggaaattgtcagcag

SEQ ID NO: 2015 - DNA, 14 bp, Artificial
  Synthesized antisense oligonucleotide
gggaaattgtcagc

SEQ ID NO: 2016 - DNA, 15 bp, Artificial
  Synthesized antisense oligonucleotide
gtgtgggaaattgtc

SEQ ID NO: 2017 - DNA, 15 bp, Artificial
  Synthesized antisense oligonucleotide
ggtttacacggtgtg

SEQ ID NO: 2018 - DNA, 15 bp, Artificial
  Synthesized antisense oligonucleotide
gctttggtttacacg

SEQ ID NO: 2019 - DNA, 15 bp, Artificial
  Synthesized antisense oligonucleotide
gcacctttgggatgc

SEQ ID NO: 2020 - DNA, 15 bp, Artificial
  Synthesized antisense oligonucleotide
ccaggttctgcttcc

SEQ ID NO: 2021 - DNA, 15 bp, Artificial
  Synthesized antisense oligonucleotide
gctctgtctagtggc

SEQ ID NO: 2022 - DNA, 14 bp, Artificial
  Synthesized antisense oligonucleotide
actctccatgtctc

SEQ ID NO: 2023 - DNA, 16 bp, Artificial
  Synthesized antisense oligonucleotide
caactctccatgtctc

SEQ ID NO: 2024 - DNA, 14 bp, Artificial
  Synthesized antisense oligonucleotide
caactctccatgtc

SEQ ID NO: 2025 - DNA, 14 bp, Artificial
  Synthesized antisense oligonucleotide
agcaactctccatg

SEQ ID NO: 2026 - DNA, 16 bp, Artificial
  Synthesized antisense oligonucleotide
gtagcaactctccatg

SEQ ID NO: 2027 - DNA, 14 bp, Artificial
  Synthesized antisense oligonucleotide
gtagcaactctcca

SEQ ID NO: 2028 - DNA, 17 bp, Artificial
  Synthesized antisense oligonucleotide
ggttgtagcaactctcc

SEQ ID NO: 2029 - DNA, 14 bp, Artificial
  Synthesized antisense oligonucleotide
cgggcagtcctcca

SEQ ID NO: 2030 - DNA, 13 bp, Artificial
  Synthesized antisense oligonucleotide
gcaccgggcagtc

SEQ ID NO: 2031 - DNA, 13 bp, Artificial
  Synthesized antisense oligonucleotide
aggcaccgggcag

SEQ ID NO: 2032 - DNA, 15 bp, Artificial
  Synthesized antisense oligonucleotide
gtgtgttaccaggtc

SEQ ID NO: 2033 - DNA, 15 bp, Artificial
  Synthesized antisense oligonucleotide
tgtgtgttaccaggt

SEQ ID NO: 2034 - DNA, 14 bp, Artificial
  Synthesized antisense oligonucleotide
tgggtcactgtgtg

SEQ ID NO: 2035 - DNA, 15 bp, Artificial
  Synthesized antisense oligonucleotide
cagactgtgggcatg

SEQ ID NO: 2036 - DNA, 16 bp, Artificial
  Synthesized antisense oligonucleotide
cccaccagactgtggg

SEQ ID NO: 2037 - DNA, 14 bp, Artificial
  Synthesized antisense oligonucleotide
ccaccagactgtgg

SEQ ID NO: 2038 - DNA, 14 bp, Artificial
  Synthesized antisense oligonucleotide
tgcccaccagactg

SEQ ID NO: 2039 - DNA, 13 bp, Artificial
  Synthesized antisense oligonucleotide
cggcttcctcccc

SEQ ID NO: 2040 - DNA, 14 bp, Artificial
  Synthesized antisense oligonucleotide
ccttgtcttccacc

SEQ ID NO: 2041 - DNA, 14 bp, Artificial
  Synthesized antisense oligonucleotide
accgaggctgccac

SEQ ID NO: 2042 - DNA, 14 bp, Artificial
  Synthesized antisense oligonucleotide
ggaagaaaccgagg

SEQ ID NO: 2043 - DNA, 14 bp, Artificial
  Synthesized antisense oligonucleotide
gggaagaaaccgag

SEQ ID NO: 2044 - DNA, 13 bp, Artificial
  Synthesized antisense oligonucleotide
ggccatctgcgcc

SEQ ID NO: 2045 - DNA, 13 bp, Artificial
  Synthesized antisense oligonucleotide
gcggccatctgcg

SEQ ID NO: 2046 - DNA, 14 bp, Artificial
  Synthesized antisense oligonucleotide
gtggcggccatctg

SEQ ID NO: 2047 - DNA, 14 bp, Artificial
  Synthesized antisense oligonucleotide
accgtggcggccat

SEQ ID NO: 2048 - DNA, 17 bp, Artificial
  Synthesized antisense oligonucleotide
gccgctcaatcttcatc

SEQ ID NO: 2049 - DNA, 17 bp, Artificial
  Synthesized antisense oligonucleotide
cttcatcttgtgatagg

SEQ ID NO: 2050 - DNA, 17 bp, Artificial
  Synthesized antisense oligonucleotide
gctcaatcttcatcttg

SEQ ID NO: 2051 - DNA, 17 bp, Artificial
  Synthesized antisense oligonucleotide
cagaaacactgttacag

SEQ ID NO: 2052 - DNA, 17 bp, Artificial
  Synthesized antisense oligonucleotide
cagttgcagaaacactg

SEQ ID NO: 2053 - DNA, 17 bp, Artificial
  Synthesized antisense oligonucleotide
gtttcagttgcagaaac

SEQ ID NO: 2054 - DNA, 14 bp, Artificial
  Synthesized antisense oligonucleotide
cttccaccagaggg

SEQ ID NO: 2055 - DNA, 14 bp, Artificial
  Synthesized antisense oligonucleotide
gtcttccaccagag

SEQ ID NO: 2056 - DNA, 17 bp, Artificial
  Synthesized antisense oligonucleotide
cttgtcttccaccagag

SEQ ID NO: 2057 - DNA, 14 bp, Artificial
  Synthesized antisense oligonucleotide
tccttgtcttccac

SEQ ID NO: 2058 - DNA, 16 bp, Artificial
  Synthesized antisense oligonucleotide
cttccttgtcttccac

SEQ ID NO: 2059 - DNA, 15 bp, Artificial
  Synthesized antisense oligonucleotide
catcttgtgataggg

SEQ ID NO: 2060 - DNA, 15 bp, Artificial
  Synthesized antisense oligonucleotide
gctaggtgcagtggt

SEQ ID NO: 2061 - DNA, 14 bp, Artificial
  Synthesized antisense oligonucleotide
gatggctaggtgca

SEQ ID NO: 2062 - DNA, 15 bp, Artificial
  Synthesized antisense oligonucleotide
gtggatgatggctag

SEQ ID NO: 2063 - DNA, 14 bp, Artificial
  Synthesized antisense oligonucleotide
cccgtggatgatgg

SEQ ID NO: 2064 - DNA, 14 bp, Artificial
  Synthesized antisense oligonucleotide
ctgcccgtggatga

SEQ ID NO: 2065 - DNA, 14 bp, Artificial
  Synthesized antisense oligonucleotide
agagcctccaccca

SEQ ID NO: 2066 - DNA, 15 bp, Artificial
  Synthesized antisense oligonucleotide
gttgtactctcgagc

SEQ ID NO: 2067 - DNA, 13 bp, Artificial
  Synthesized antisense oligonucleotide
cgttgtactctcg

SEQ ID NO: 2068 - DNA, 14 bp, Artificial
  Synthesized antisense oligonucleotide
cgcgttgtactctc

SEQ ID NO: 2069 - DNA, 14 bp, Artificial
  Synthesized antisense oligonucleotide
gagtctccatgccg

SEQ ID NO: 2070 - DNA, 14 bp, Artificial
  Synthesized antisense oligonucleotide
ctgagtctccatgc

SEQ ID NO: 2071 - DNA, 14 bp, Artificial
  Synthesized antisense oligonucleotide
catggctgagtctc

SEQ ID NO: 2072 - DNA, 14 bp, Artificial
  Synthesized antisense oligonucleotide
tgcatggctgagtc

SEQ ID NO: 2073 - DNA, 14 bp, Artificial
  Synthesized antisense oligonucleotide
gcgttcacgttggc

SEQ ID NO: 2074 - DNA, 14 bp, Artificial
  Synthesized antisense oligonucleotide
gtgcgagcgttcac

SEQ ID NO: 2075 - DNA, 14 bp, Artificial
  Synthesized antisense oligonucleotide
aggtgcgagcgttc

SEQ ID NO: 2076 - DNA, 14 bp, Artificial
  Synthesized antisense oligonucleotide
gcaaaggtgcgagc

SEQ ID NO: 2077 - DNA, 14 bp, Artificial
  Synthesized antisense oligonucleotide
cctggtggctcagg

SEQ ID NO: 2078 - DNA, 14 bp, Artificial
  Synthesized antisense oligonucleotide
gtcagtcacctgag

SEQ ID NO: 2079 - DNA, 15 bp, Artificial
  Synthesized antisense oligonucleotide
caggtcagtcacctg

SEQ ID NO: 2080 - DNA, 15 bp, Artificial
  Synthesized antisense oligonucleotide
cagcaggtcagtcac

SEQ ID NO: 2081 - DNA, 14 bp, Artificial
  Synthesized antisense oligonucleotide
gcagcaggtcagtc

SEQ ID NO: 2082 - DNA, 17 bp, Artificial
  Synthesized antisense oligonucleotide
catttagcagcaaggtc

SEQ ID NO: 2083 - DNA, 15 bp, Artificial
  Synthesized antisense oligonucleotide
gcagcatttagcagc

SEQ ID NO: 2084 - DNA, 15 bp, Artificial
  Synthesized antisense oligonucleotide
ctgagcagcatttag

SEQ ID NO: 2085 - DNA, 14 bp, Artificial
  Synthesized antisense oligonucleotide
cccatgagaatcct

SEQ ID NO: 2086 - DNA, 17 bp, Artificial
  Synthesized antisense oligonucleotide
ccttcccatgagaatcc

SEQ ID NO: 2087 - DNA, 14 bp, Artificial
  Synthesized antisense oligonucleotide
tcctccccttccca

SEQ ID NO: 2088 - DNA, 14 bp, Artificial
  Synthesized antisense oligonucleotide
gcctccagtagacc

SEQ ID NO: 2089 - DNA, 14 bp, Artificial
  Synthesized antisense oligonucleotide
gtcagacagggcct

SEQ ID NO: 2090 - DNA, 14 bp, Artificial
  Synthesized antisense oligonucleotide
ccatgtcagacagg

SEQ ID NO: 2091 - DNA, 14 bp, Artificial
  Synthesized antisense oligonucleotide
ggcccatgtcagac

SEQ ID NO: 2092 - DNA, 17 bp, Artificial
  Synthesized antisense oligonucleotide
gctattcctgaaatcac

SEQ ID NO: 2093 - DNA, 17 bp, Artificial
  Synthesized antisense oligonucleotide
cctcttgtcttcttacc

SEQ ID NO: 2094 - DNA, 17 bp, Artificial
  Synthesized antisense oligonucleotide
ggagaagaaacctcttg

SEQ ID NO: 2095 - DNA, 17 bp, Artificial
  Synthesized antisense oligonucleotide
ccttgctgaagtttctt

SEQ ID NO: 2096 - DNA, 14 bp, Artificial
  Synthesized antisense oligonucleotide
ccaagactccttgc

SEQ ID NO: 2097 - DNA, 14 bp, Artificial
  Synthesized antisense oligonucleotide
ccctttcatggagc

SEQ ID NO: 2098 - DNA, 14 bp, Artificial
  Synthesized antisense oligonucleotide
cctcttggtgtgac

SEQ ID NO: 2099 - DNA, 14 bp, Artificial
  Synthesized antisense oligonucleotide
gactaaggatgccg

SEQ ID NO: 2100 - DNA, 15 bp, Artificial
  Synthesized antisense oligonucleotide
gtggcaggactaagg

SEQ ID NO: 2101 - DNA, 14 bp, Artificial
  Synthesized antisense oligonucleotide
agacgtggcaggac

SEQ ID NO: 2102 - DNA, 14 bp, Artificial
  Synthesized antisense oligonucleotide
cttccagcaggcag

SEQ ID NO: 2103 - DNA, 14 bp, Artificial
  Synthesized antisense oligonucleotide
gttcctctgcctgg

SEQ ID NO: 2104 - DNA, 16 bp, Artificial
  Synthesized antisense oligonucleotide
gatgttcctctgcctg

SEQ ID NO: 2105 - DNA, 16 bp, Artificial
  Synthesized antisense oligonucleotide
gagatgttcctctgcc

SEQ ID NO: 2106 - DNA, 16 bp, Artificial
  Synthesized antisense oligonucleotide
gtgagatgttcctctg

SEQ ID NO: 2107 - DNA, 18 bp, Artificial
  Synthesized antisense oligonucleotide
cagagagtgagatgttcc

SEQ ID NO: 2108 - DNA, 18 bp, Artificial
  Synthesized antisense oligonucleotide
ccagagagtgagatgttc

SEQ ID NO: 2109 - DNA, 15 bp, Artificial
  Synthesized antisense oligonucleotide
ggtccagagagtgag

SEQ ID NO: 2110 - DNA, 15 bp, Artificial
  Synthesized antisense oligonucleotide
gaggtccagagagtg

SEQ ID NO: 2111 - DNA, 14 bp, Artificial
  Synthesized antisense oligonucleotide
ggtcctgtagtgcc

SEQ ID NO: 2112 - DNA, 17 bp, Artificial
  Synthesized antisense oligonucleotide
gattttatgatgcaggc

SEQ ID NO: 2113 - DNA, 18 bp, Artificial
  Synthesized antisense oligonucleotide
gacctgcatcccttattg

SEQ ID NO: 2114 - DNA, 18 bp, Artificial
  Synthesized antisense oligonucleotide
tagttgattttccagcag

SEQ ID NO: 2115 - DNA, 16 bp, Artificial
  Synthesized antisense oligonucleotide
gaatctcacgttttgc

SEQ ID NO: 2116 - DNA, 18 bp, Artificial
  Synthesized antisense oligonucleotide
cagagaaagaatctcacg

SEQ ID NO: 2117 - DNA, 18 bp, Artificial
  Synthesized antisense oligonucleotide
tttcaccatcagagaaag

SEQ ID NO: 2118 - DNA, 17 bp, Artificial
  Synthesized antisense oligonucleotide
catttggacatttcacc

SEQ ID NO: 2119 - DNA, 18 bp, Artificial
  Synthesized antisense oligonucleotide
ccttcatttggacatttc

SEQ ID NO: 2120 - DNA, 18 bp, Artificial
  Synthesized antisense oligonucleotide
caatgtgcttgatgatcc

SEQ ID NO: 2121 - DNA, 15 bp, Artificial
  Synthesized antisense oligonucleotide
cgcatcggatttctc

SEQ ID NO: 2122 - DNA, 18 bp, Artificial
  Synthesized antisense oligonucleotide
caaaccgcatcggatttc

SEQ ID NO: 2123 - DNA, 14 bp, Artificial
  Synthesized antisense oligonucleotide
gaactgcaaaccgc

SEQ ID NO: 2124 - DNA, 15 bp, Artificial
  Synthesized antisense oligonucleotide
gcagagaagaactgc

SEQ ID NO: 2125 - DNA, 15 bp, Artificial
  Synthesized antisense oligonucleotide
gcaagtaaacatggg

SEQ ID NO: 2126 - DNA, 14 bp, Artificial
  Synthesized antisense oligonucleotide
ggtccacgttttgg

SEQ ID NO: 2127 - DNA, 16 bp, Artificial
  Synthesized antisense oligonucleotide
gcaagggtccacgttt

SEQ ID NO: 2128 - DNA, 17 bp, Artificial
  Synthesized antisense oligonucleotide
tggcttcttcttcaggg

SEQ ID NO: 2129 - DNA, 16 bp, Artificial
  Synthesized antisense oligonucleotide
tcctgctggcttcttc

SEQ ID NO: 2130 - DNA, 14 bp, Artificial
  Synthesized antisense oligonucleotide
gtcctgctggcttc

SEQ ID NO: 2131 - DNA, 17 bp, Artificial
  Synthesized antisense oligonucleotide
ggtagtctaggaattgg

SEQ ID NO: 2132 - DNA, 17 bp, Artificial
  Synthesized antisense oligonucleotide
cttgcaggtagtctagg

SEQ ID NO: 2133 - DNA, 17 bp, Artificial
  Synthesized antisense oligonucleotide
gaaactcttgcaggtag

SEQ ID NO: 2134 - DNA, 17 bp, Artificial
  Synthesized antisense oligonucleotide
caccaagaaactcttgc

SEQ ID NO: 2135 - DNA, 18 bp, Artificial
  Synthesized antisense oligonucleotide
cattacaccaagaaactc

SEQ ID NO: 2136 - DNA, 18 bp, Artificial
  Synthesized antisense oligonucleotide
ctcggtgttcattacacc

SEQ ID NO: 2137 - DNA, 18 bp, Artificial
  Synthesized antisense oligonucleotide
ctttctattatccactcg

SEQ ID NO: 2138 - DNA, 18 bp, Artificial
  Synthesized antisense oligonucleotide
ccagtttagtctcaactt

SEQ ID NO: 2139 - DNA, 18 bp, Artificial
  Synthesized antisense oligonucleotide
aaccagtttagtctcaac

SEQ ID NO: 2140 - DNA, 18 bp, Artificial
  Synthesized antisense oligonucleotide
acaaaccagtttagtctc

SEQ ID NO: 2141 - DNA, 18 bp, Artificial
  Synthesized antisense oligonucleotide
ctcgcgaaaaagtttctt

SEQ ID NO: 2142 - DNA, 18 bp, Artificial
  Synthesized antisense oligonucleotide
ccctcgcgaaaaagtttc

SEQ ID NO: 2143 - DNA, 16 bp, Artificial
  Synthesized antisense oligonucleotide
gtccctcgcgaaaaag

SEQ ID NO: 2144 - DNA, 15 bp, Artificial
  Synthesized antisense oligonucleotide
cagttgaaccgtccc

SEQ ID NO: 2145 - DNA, 18 bp, Artificial
  Synthesized antisense oligonucleotide
gctttcgaagtttcagtt

SEQ ID NO: 2146 - DNA, 17 bp, Artificial
  Synthesized antisense oligonucleotide
gatgctttcgaagtttc

SEQ ID NO: 2147 - DNA, 18 bp, Artificial
  Synthesized antisense oligonucleotide
ctgtctctgcaaataatg

SEQ ID NO: 2148 - DNA, 18 bp, Artificial
  Synthesized antisense oligonucleotide
cacttattacattcaccc

SEQ ID NO: 2149 - DNA, 17 bp, Artificial
  Synthesized antisense oligonucleotide
ttttcctccagttcctc

SEQ ID NO: 2150 - DNA, 20 bp, Artificial
  Synthesized antisense oligonucleotide
ggacaatatgtacaaaactc

SEQ ID NO: 2151 - DNA, 18 bp, Artificial
  Synthesized antisense oligonucleotide
gttgatgaacatttggac

SEQ ID NO: 2152 - DNA, 18 bp, Artificial
  Synthesized antisense oligonucleotide
gtgttgatgaacatttgg

SEQ ID NO: 2153 - DNA, 16 bp, Artificial
  Synthesized antisense oligonucleotide
caaaatttggccaggg

SEQ ID NO: 2154 - DNA, 15 bp, Artificial
  Synthesized antisense oligonucleotide
gcccaaaatttggcc

SEQ ID NO: 2155 - DNA, 17 bp, Artificial
  Synthesized antisense oligonucleotide
cccagcccaaaatttgg

SEQ ID NO: 2156 - DNA, 17 bp, Artificial
  Synthesized antisense oligonucleotide
gtccccagcccaaaatt

SEQ ID NO: 2157 - DNA, 16 bp, Artificial
  Synthesized antisense oligonucleotide
aaatcgccagaggctg

SEQ ID NO: 2158 - DNA, 16 bp, Artificial
  Synthesized antisense oligonucleotide
accaaatcgccagagg

SEQ ID NO: 2159 - DNA, 17 bp, Artificial
  Synthesized antisense oligonucleotide
catcaccaaatcgccag

SEQ ID NO: 2160 - DNA, 16 bp, Artificial
  Synthesized antisense oligonucleotide
taggagtggttgaggc

SEQ ID NO: 2161 - DNA, 17 bp, Artificial
  Synthesized antisense oligonucleotide
gtgtaggagtggttgag

SEQ ID NO: 2162 - DNA, 14 bp, Artificial
  Synthesized antisense oligonucleotide
ctgtgtaggagtgg

SEQ ID NO: 2163 - DNA, 14 bp, Artificial
  Synthesized antisense oligonucleotide
cccacatgcctgtg

SEQ ID NO: 2164 - DNA, 14 bp, Artificial
  Synthesized antisense oligonucleotide
cgatgaacaacgag

SEQ ID NO: 2165 - DNA, 16 bp, Artificial
  Synthesized antisense oligonucleotide
ctggcgatgaacaacg

SEQ ID NO: 2166 - DNA, 14 bp, Artificial
  Synthesized antisense oligonucleotide
cgctggcgatgaac

SEQ ID NO: 2167 - DNA, 15 bp, Artificial
  Synthesized antisense oligonucleotide
gagctagtcccgttg

SEQ ID NO: 2168 - DNA, 15 bp, Artificial
  Synthesized antisense oligonucleotide
gcgaagagctagtcc

SEQ ID NO: 2169 - DNA, 17 bp, Artificial
  Synthesized antisense oligonucleotide
ccagttatgcgaagagc

SEQ ID NO: 2170 - DNA, 16 bp, Artificial
  Synthesized antisense oligonucleotide
ccccagttatgcgaag

SEQ ID NO: 2171 - DNA, 14 bp, Artificial
  Synthesized antisense oligonucleotide
cacatgcttggcgc

SEQ ID NO: 2172 - DNA, 16 bp, Artificial
  Synthesized antisense oligonucleotide
gatcacatgcttggcg

SEQ ID NO: 2173 - DNA, 18 bp, Artificial
  Synthesized antisense oligonucleotide
gacaaagagcatgatcac

SEQ ID NO: 2174 - DNA, 17 bp, Artificial
  Synthesized antisense oligonucleotide
gagtcacagggacaaag

SEQ ID NO: 2175 - DNA, 15 bp, Artificial
  Synthesized antisense oligonucleotide
gagagtcacagggac

SEQ ID NO: 2176 - DNA, 15 bp, Artificial
  Synthesized antisense oligonucleotide
gcagagagtcacagg

SEQ ID NO: 2177 - DNA, 14 bp, Artificial
  Synthesized antisense oligonucleotide
ccatgcagagagtc

SEQ ID NO: 2178 - DNA, 15 bp, Artificial
  Synthesized antisense oligonucleotide
ccaccatgcagagag

SEQ ID NO: 2179 - DNA, 14 bp, Artificial
  Synthesized antisense oligonucleotide
tagccacgaccacc

SEQ ID NO: 2180 - DNA, 18 bp, Artificial
  Synthesized antisense oligonucleotide
gattagctgcccatcctt

SEQ ID NO: 2181 - DNA, 17 bp, Artificial
  Synthesized antisense oligonucleotide
ggtatagattagctgcc

SEQ ID NO: 2182 - DNA, 18 bp, Artificial
  Synthesized antisense oligonucleotide
gtatcttctgtgaatggg

SEQ ID NO: 2183 - DNA, 14 bp, Artificial
  Synthesized antisense oligonucleotide
ctggcccacagtct

SEQ ID NO: 2184 - DNA, 14 bp, Artificial
  Synthesized antisense oligonucleotide
ctctggcccacagt

SEQ ID NO: 2185 - DNA, 14 bp, Artificial
  Synthesized antisense oligonucleotide
tgcagggctctctg

SEQ ID NO: 2186 - DNA, 14 bp, Artificial
  Synthesized antisense oligonucleotide
agtgcagggctctc

SEQ ID NO: 2187 - DNA, 16 bp, Artificial
  Synthesized antisense oligonucleotide
cactgatcatgatggc

SEQ ID NO: 2188 - DNA, 18 bp, Artificial
  Synthesized antisense oligonucleotide
gacactgatcatgatggc

SEQ ID NO: 2189 - DNA, 18 bp, Artificial
  Synthesized antisense oligonucleotide
acaatgacactgatcatg

SEQ ID NO: 2190 - DNA, 16 bp, Artificial
  Synthesized antisense oligonucleotide
gaaccaccaggaggat

SEQ ID NO: 2191 - DNA, 17 bp, Artificial
  Synthesized antisense oligonucleotide
gacacaaaacagccact

SEQ ID NO: 2192 - DNA, 15 bp, Artificial
  Synthesized antisense oligonucleotide
gtggacctttcggac

SEQ ID NO: 2193 - DNA, 17 bp, Artificial
  Synthesized antisense oligonucleotide
caaccagcatacgaagt

SEQ ID NO: 2194 - DNA, 14 bp, Artificial
  Synthesized antisense oligonucleotide
tccctctgggcttc

SEQ ID NO: 2195 - DNA, 14 bp, Artificial
  Synthesized antisense oligonucleotide
actgtccctctggg

SEQ ID NO: 2196 - DNA, 14 bp, Artificial
  Synthesized antisense oligonucleotide
gactgtccctctgg

SEQ ID NO: 2197 - DNA, 16 bp, Artificial
  Synthesized antisense oligonucleotide
cctagatgactgtccc

SEQ ID NO: 2198 - DNA, 15 bp, Artificial
  Synthesized antisense oligonucleotide
cagcgaggatactgc

SEQ ID NO: 2199 - DNA, 16 bp, Artificial
  Synthesized antisense oligonucleotide
cttcaccagcgaggat

SEQ ID NO: 2200 - DNA, 18 bp, Artificial
  Synthesized antisense oligonucleotide
tttcctctgggtcttcac

SEQ ID NO: 2201 - DNA, 17 bp, Artificial
  Synthesized antisense oligonucleotide
ctttcctctgggtcttc

SEQ ID NO: 2202 - DNA, 17 bp, Artificial
  Synthesized antisense oligonucleotide
ctcccaatccaagtttt

SEQ ID NO: 2203 - DNA, 14 bp, Artificial
  Synthesized antisense oligonucleotide
ttcatcccggagcc

SEQ ID NO: 2204 - DNA, 16 bp, Artificial
  Synthesized antisense oligonucleotide
ttcttcatcccggagc

SEQ ID NO: 2205 - DNA, 16 bp, Artificial
  Synthesized antisense oligonucleotide
gctcagccagttcttc

SEQ ID NO: 2206 - DNA, 14 bp, Artificial
  Synthesized antisense oligonucleotide
gacagagagggcac

SEQ ID NO: 2207 - DNA, 15 bp, Artificial
  Synthesized antisense oligonucleotide
cttcacctccgacag

SEQ ID NO: 2208 - DNA, 16 bp, Artificial
  Synthesized antisense oligonucleotide
gaaaagtctgggcagg

SEQ ID NO: 2209 - DNA, 18 bp, Artificial
  Synthesized antisense oligonucleotide
gaccctggaacagaaaag

SEQ ID NO: 2210 - DNA, 15 bp, Artificial
  Synthesized antisense oligonucleotide
ctgaccctggaacag

SEQ ID NO: 2211 - DNA, 16 bp, Artificial
  Synthesized antisense oligonucleotide
actacaggctgaccct

SEQ ID NO: 2212 - DNA, 18 bp, Artificial
  Synthesized antisense oligonucleotide
attcactacaggctgacc

SEQ ID NO: 2213 - DNA, 14 bp, Artificial
  Synthesized antisense oligonucleotide
cgattcactacagg

SEQ ID NO: 2214 - DNA, 14 bp, Artificial
  Synthesized antisense oligonucleotide
ggccgattcactac

SEQ ID NO: 2215 - DNA, 16 bp, Artificial
  Synthesized antisense oligonucleotide
cgaacgtctgttggtc

SEQ ID NO: 2216 - DNA, 15 bp, Artificial
  Synthesized antisense oligonucleotide
cgcgaacgtctgttg

SEQ ID NO: 2217 - DNA, 18 bp, Artificial
  Synthesized antisense oligonucleotide
cttctgtttgtcgaggat

SEQ ID NO: 2218 - DNA, 18 bp, Artificial
  Synthesized antisense oligonucleotide
ttcaccaccttctgtttg

SEQ ID NO: 2219 - DNA, 18 bp, Artificial
  Synthesized antisense oligonucleotide
aggatgcgcttttcattc

SEQ ID NO: 2220 - DNA, 15 bp, Artificial
  Synthesized antisense oligonucleotide
agcttgcaggatgcg

SEQ ID NO: 2221 - DNA, 18 bp, Artificial
  Synthesized antisense oligonucleotide
gttgacagcttgcaggat

SEQ ID NO: 2222 - DNA, 18 bp, Artificial
  Synthesized antisense oligonucleotide
ggaacggaaagttgacag

SEQ ID NO: 2223 - DNA, 18 bp, Artificial
  Synthesized antisense oligonucleotide
aactcgagtttgacgagg

SEQ ID NO: 2224 - DNA, 17 bp, Artificial
  Synthesized antisense oligonucleotide
tgtccttgaaggagaac

SEQ ID NO: 2225 - DNA, 18 bp, Artificial
  Synthesized antisense oligonucleotide
cgtactccatgaccatgt

SEQ ID NO: 2226 - DNA, 16 bp, Artificial
  Synthesized antisense oligonucleotide
gcacgtactccatgac

SEQ ID NO: 2227 - DNA, 16 bp, Artificial
  Synthesized antisense oligonucleotide
gattctccggcttcag

SEQ ID NO: 2228 - DNA, 18 bp, Artificial
  Synthesized antisense oligonucleotide
tcaatgagcagattctcc

SEQ ID NO: 2229 - DNA, 17 bp, Artificial
  Synthesized antisense oligonucleotide
ggtcaatgagcagattc

SEQ ID NO: 2230 - DNA, 15 bp, Artificial
  Synthesized antisense oligonucleotide
ccctgctggtcaatg

SEQ ID NO: 2231 - DNA, 14 bp, Artificial
  Synthesized antisense oligonucleotide
tagccctgctggtc

SEQ ID NO: 2232 - DNA, 14 bp, Artificial
  Synthesized antisense oligonucleotide
cgcttggcgaaacc

SEQ ID NO: 2233 - DNA, 14 bp, Artificial
  Synthesized antisense oligonucleotide
ccttcacgcgcttg

SEQ ID NO: 2234 - DNA, 14 bp, Artificial
  Synthesized antisense oligonucleotide
aaggtccaagtgcg

SEQ ID NO: 2235 - DNA, 14 bp, Artificial
  Synthesized antisense oligonucleotide
tgccgcacaaggtc

SEQ ID NO: 2236 - DNA, 17 bp, Artificial
  Synthesized antisense oligonucleotide
ggtgaggaccaccattt

SEQ ID NO: 2237 - DNA, 14 bp, Artificial
  Synthesized antisense oligonucleotide
gggtgtcacaggtg

SEQ ID NO: 2238 - DNA, 18 bp, Artificial
  Synthesized antisense oligonucleotide
ataccatcttcttcaggg

SEQ ID NO: 2239 - DNA, 18 bp, Artificial
  Synthesized antisense oligonucleotide
ggtgataccatcttcttc

SEQ ID NO: 2240 - DNA, 18 bp, Artificial
  Synthesized antisense oligonucleotide
ccaggtgataccatcttc

SEQ ID NO: 2241 - DNA, 15 bp, Artificial
  Synthesized antisense oligonucleotide
cctcactgctctggt

SEQ ID NO: 2242 - DNA, 14 bp, Artificial
  Synthesized antisense oligonucleotide
taagacctcactgc

SEQ ID NO: 2243 - DNA, 16 bp, Artificial
  Synthesized antisense oligonucleotide
cagagcctaagacctc

SEQ ID NO: 2244 - DNA, 15 bp, Artificial
  Synthesized antisense oligonucleotide
ccagagcctaagacc

SEQ ID NO: 2245 - DNA, 18 bp, Artificial
  Synthesized antisense oligonucleotide
tcttcctttttgtgaagc

SEQ ID NO: 2246 - DNA, 18 bp, Artificial
  Synthesized antisense oligonucleotide
gaccaaattccatcttcc

SEQ ID NO: 2247 - DNA, 18 bp, Artificial
  Synthesized antisense oligonucleotide
atcagtggaccaaattcc

SEQ ID NO: 2248 - DNA, 18 bp, Artificial
  Synthesized antisense oligonucleotide
ggttctttctggtccttt

SEQ ID NO: 2249 - DNA, 18 bp, Artificial
  Synthesized antisense oligonucleotide
tttttgggttctttctgg

SEQ ID NO: 2250 - DNA, 18 bp, Artificial
  Synthesized antisense oligonucleotide
ggtcttatttttgggttc

SEQ ID NO: 2251 - DNA, 17 bp, Artificial
  Synthesized antisense oligonucleotide
aatgggcagactctcct

SEQ ID NO: 2252 - DNA, 18 bp, Artificial
  Synthesized antisense oligonucleotide
tccaccatgacctcaatg

SEQ ID NO: 2253 - DNA, 16 bp, Artificial
  Synthesized antisense oligonucleotide
aacggcatccaccatg

SEQ ID NO: 2254 - DNA, 15 bp, Artificial
  Synthesized antisense oligonucleotide
gtgaacggcatccac

SEQ ID NO: 2255 - DNA, 18 bp, Artificial
  Synthesized antisense oligonucleotide
acttgagcttgtgaacgg

SEQ ID NO: 2256 - DNA, 18 bp, Artificial
  Synthesized antisense oligonucleotide
ttcatacttgagcttgtg

SEQ ID NO: 2257 - DNA, 18 bp, Artificial
  Synthesized antisense oligonucleotide
ctggtgtagttttcatac

SEQ ID NO: 2258 - DNA, 18 bp, Artificial
  Synthesized antisense oligonucleotide
agctgctggtgtagtttt

SEQ ID NO: 2259 - DNA, 14 bp, Artificial
  Synthesized antisense oligonucleotide
aggaggaccagggt

SEQ ID NO: 2260 - DNA, 14 bp, Artificial
  Synthesized antisense oligonucleotide
aggtggtccaggag

SEQ ID NO: 2261 - DNA, 18 bp, Artificial
  Synthesized antisense oligonucleotide
tttctggccaaactgagg

SEQ ID NO: 2262 - DNA, 14 bp, Artificial
  Synthesized antisense oligonucleotide
ggaggtttctggcc

SEQ ID NO: 2263 - DNA, 14 bp, Artificial
  Synthesized antisense oligonucleotide
tctggagtggccac

SEQ ID NO: 2264 - DNA, 18 bp, Artificial
  Synthesized antisense oligonucleotide
cttctggagcatgttgct

SEQ ID NO: 2265 - DNA, 15 bp, Artificial
  Synthesized antisense oligonucleotide
gccttctggagcatg

SEQ ID NO: 2266 - DNA, 17 bp, Artificial
  Synthesized antisense oligonucleotide
gtttgtctggccttctg

SEQ ID NO: 2267 - DNA, 18 bp, Artificial
  Synthesized antisense oligonucleotide
gagtttgtctggccttct

SEQ ID NO: 2268 - DNA, 18 bp, Artificial
  Synthesized antisense oligonucleotide
ctagagtttgtctggcct

SEQ ID NO: 2269 - DNA, 18 bp, Artificial
  Synthesized antisense oligonucleotide
gcaagggtaaaattctag

SEQ ID NO: 2270 - DNA, 18 bp, Artificial
  Synthesized antisense oligonucleotide
agtgcaagggtaaaattc

SEQ ID NO: 2271 - DNA, 15 bp, Artificial
  Synthesized antisense oligonucleotide
aaacaggcctccact

SEQ ID NO: 2272 - DNA, 18 bp, Artificial
  Synthesized antisense oligonucleotide
cttggttaattccaatgg

SEQ ID NO: 2273 - DNA, 18 bp, Artificial
  Synthesized antisense oligonucleotide
aggcaactcccattagtt

SEQ ID NO: 2274 - DNA, 18 bp, Artificial
  Synthesized antisense oligonucleotide
tactactaaggcacaggg

SEQ ID NO: 2275 - DNA, 18 bp, Artificial
  Synthesized antisense oligonucleotide
aatactactaaggcacag

SEQ ID NO: 2276 - DNA, 18 bp, Artificial
  Synthesized antisense oligonucleotide
gtacatcttcaagtcttc

SEQ ID NO: 2277 - DNA, 14 bp, Artificial
  Synthesized antisense oligonucleotide
ggagtggacatgat

SEQ ID NO: 2278 - DNA, 18 bp, Artificial
  Synthesized antisense oligonucleotide
aagaagatgaagcctttg

SEQ ID NO: 2279 - DNA, 18 bp, Artificial
  Synthesized antisense oligonucleotide
ccgtcttactcttcttgg

SEQ ID NO: 2280 - DNA, 17 bp, Artificial
  Synthesized antisense oligonucleotide
ccgatacaattccaagg

SEQ ID NO: 2281 - DNA, 15 bp, Artificial
  Synthesized antisense oligonucleotide
ccttttccttctgag

SEQ ID NO: 2282 - DNA, 14 bp, Artificial
  Synthesized antisense oligonucleotide
ctgttgcaagtacg

SEQ ID NO: 2283 - DNA, 14 bp, Artificial
  Synthesized antisense oligonucleotide
cagaagcagagggc

SEQ ID NO: 2284 - DNA, 15 bp, Artificial
  Synthesized antisense oligonucleotide
cctcagaagcagagg

SEQ ID NO: 2285 - DNA, 14 bp, Artificial
  Synthesized antisense oligonucleotide
ctcctcagaagcag

SEQ ID NO: 2286 - DNA, 14 bp, Artificial
  Synthesized antisense oligonucleotide
acaggctggtggca

SEQ ID NO: 2287 - DNA, 16 bp, Artificial
  Synthesized antisense oligonucleotide
ccactctcaaacaggc

SEQ ID NO: 2288 - DNA, 14 bp, Artificial
  Synthesized antisense oligonucleotide
acggtagccgaagc

SEQ ID NO: 2289 - DNA, 15 bp, Artificial
  Synthesized antisense oligonucleotide
gacggtagccgaagc

SEQ ID NO: 2290 - DNA, 14 bp, Artificial
  Synthesized antisense oligonucleotide
ggccagacggtagc

SEQ ID NO: 2291 - DNA, 18 bp, Artificial
  Synthesized antisense oligonucleotide
gtgtagggccagacggta

SEQ ID NO: 2292 - DNA, 18 bp, Artificial
  Synthesized antisense oligonucleotide
ccgaagccatttttcagg

SEQ ID NO: 2293 - DNA, 17 bp, Artificial
  Synthesized antisense oligonucleotide
ccccgaagccatttttc

SEQ ID NO: 2294 - DNA, 14 bp, Artificial
  Synthesized antisense oligonucleotide
ggttgatgtcgtcc

SEQ ID NO: 2295 - DNA, 15 bp, Artificial
  Synthesized antisense oligonucleotide
gcttgagacactcgc

SEQ ID NO: 2296 - DNA, 14 bp, Artificial
  Synthesized antisense oligonucleotide
ccggacccgtccat

SEQ ID NO: 2297 - DNA, 14 bp, Artificial
  Synthesized antisense oligonucleotide
gcttgctttactgc

SEQ ID NO: 2298 - DNA, 14 bp, Artificial
  Synthesized antisense oligonucleotide
ggttgctctgagac

SEQ ID NO: 2299 - DNA, 14 bp, Artificial
  Synthesized antisense oligonucleotide
gccacagtcatgcc

SEQ ID NO: 2300 - DNA, 14 bp, Artificial
  Synthesized antisense oligonucleotide
cgggcatgctggcg

SEQ ID NO: 2301 - DNA, 18 bp, Artificial
  Synthesized antisense oligonucleotide
gtgaagttcaggatgatc

SEQ ID NO: 2302 - DNA, 14 bp, Artificial
  Synthesized antisense oligonucleotide
ccagtgcctcatgg

SEQ ID NO: 2303 - DNA, 15 bp, Artificial
  Synthesized antisense oligonucleotide
cagtgttctccatgg

SEQ ID NO: 2304 - DNA, 15 bp, Artificial
  Synthesized antisense oligonucleotide
ctgtaccagaccgag

SEQ ID NO: 2305 - DNA, 15 bp, Artificial
  Synthesized antisense oligonucleotide
gcatactgtttcagc

SEQ ID NO: 2306 - DNA, 15 bp, Artificial
  Synthesized antisense oligonucleotide
gccatcagctccttg

SEQ ID NO: 2307 - DNA, 15 bp, Artificial
  Synthesized antisense oligonucleotide
ccacaccatagatgg

SEQ ID NO: 2308 - DNA, 15 bp, Artificial
  Synthesized antisense oligonucleotide
gctggagcagtttcc

SEQ ID NO: 2309 - DNA, 14 bp, Artificial
  Synthesized antisense oligonucleotide
ctcgcttctgctgc

SEQ ID NO: 2310 - DNA, 14 bp, Artificial
  Synthesized antisense oligonucleotide
accgtggcaaagcg

SEQ ID NO: 2311 - DNA, 14 bp, Artificial
  Synthesized antisense oligonucleotide
aggtgacaccgtgg

SEQ ID NO: 2312 - DNA, 16 bp, Artificial
  Synthesized antisense oligonucleotide
gacttgattccttcag

SEQ ID NO: 2313 - DNA, 17 bp, Artificial
  Synthesized antisense oligonucleotide
ggatttgacttgattcc

SEQ ID NO: 2314 - DNA, 14 bp, Artificial
  Synthesized antisense oligonucleotide
gctgctgttcatgg

SEQ ID NO: 2315 - DNA, 17 bp, Artificial
  Synthesized antisense oligonucleotide
ccgtttctttcagtagg

SEQ ID NO: 2316 - DNA, 14 bp, Artificial
  Synthesized antisense oligonucleotide
cttgaagtaggagc

SEQ ID NO: 2317 - DNA, 14 bp, Artificial
  Synthesized antisense oligonucleotide
cgctcctacatggc

SEQ ID NO: 2318 - DNA, 15 bp, Artificial
  Synthesized antisense oligonucleotide
gatgaggtacaggcc

SEQ ID NO: 2319 - DNA, 15 bp, Artificial
  Synthesized antisense oligonucleotide
gtagatgaggtacag

SEQ ID NO: 2320 - DNA, 15 bp, Artificial
  Synthesized antisense oligonucleotide
gagtagatgaggtac

SEQ ID NO: 2321 - DNA, 14 bp, Artificial
  Synthesized antisense oligonucleotide
cctgggagtagatg

SEQ ID NO: 2322 - DNA, 14 bp, Artificial
  Synthesized antisense oligonucleotide
ggacctgggagtag

SEQ ID NO: 2323 - DNA, 14 bp, Artificial
  Synthesized antisense oligonucleotide
acatgggtggaggg

SEQ ID NO: 2324 - DNA, 14 bp, Artificial
  Synthesized antisense oligonucleotide
gtgctcatggtgtc

SEQ ID NO: 2325 - DNA, 15 bp, Artificial
  Synthesized antisense oligonucleotide
ctttcagtgctcatg

SEQ ID NO: 2326 - DNA, 15 bp, Artificial
  Synthesized antisense oligonucleotide
tgctttcagtgctca

SEQ ID NO: 2327 - DNA, 15 bp, Artificial
  Synthesized antisense oligonucleotide
gatgatctgactgcc

SEQ ID NO: 2328 - DNA, 16 bp, Artificial
  Synthesized antisense oligonucleotide
gttcgagaagatgatc

SEQ ID NO: 2329 - DNA, 15 bp, Artificial
  Synthesized antisense oligonucleotide
gggttcgagaagatg

SEQ ID NO: 2330 - DNA, 16 bp, Artificial
  Synthesized antisense oligonucleotide
ggtttgctacaacatg

SEQ ID NO: 2331 - DNA, 15 bp, Artificial
  Synthesized antisense oligonucleotide
cagcttgagggtttg

SEQ ID NO: 2332 - DNA, 14 bp, Artificial
  Synthesized antisense oligonucleotide
tgcccctcagcttg

SEQ ID NO: 2333 - DNA, 15 bp, Artificial
  Synthesized antisense oligonucleotide
gacacacactatctc

SEQ ID NO: 2334 - DNA, 16 bp, Artificial
  Synthesized antisense oligonucleotide
gcagccatctttattc

SEQ ID NO: 2335 - DNA, 14 bp, Artificial
  Synthesized antisense oligonucleotide
gttcagcagccatc

SEQ ID NO: 2336 - DNA, 14 bp, Artificial
  Synthesized antisense oligonucleotide
tggttcagcagcca

SEQ ID NO: 2337 - DNA, 16 bp, Artificial
  Synthesized antisense oligonucleotide
ctactggttcagcagc

SEQ ID NO: 2338 - DNA, 14 bp, Artificial
  Synthesized antisense oligonucleotide
tctactggttcagc

SEQ ID NO: 2339 - DNA, 16 bp, Artificial
  Synthesized antisense oligonucleotide
gccacaaagttgatgc

SEQ ID NO: 2340 - DNA, 16 bp, Artificial
  Synthesized antisense oligonucleotide
cattgccacaaagttg

SEQ ID NO: 2341 - DNA, 16 bp, Artificial
  Synthesized antisense oligonucleotide
gagaacttggtcattc

SEQ ID NO: 2342 - DNA, 16 bp, Artificial
  Synthesized antisense oligonucleotide
ggtcaatgaagagaac

SEQ ID NO: 2343 - DNA, 14 bp, Artificial
  Synthesized antisense oligonucleotide
cgatttccttggtc

SEQ ID NO: 2344 - DNA, 15 bp, Artificial
  Synthesized antisense oligonucleotide
ccgatttccttggtc

SEQ ID NO: 2345 - DNA, 18 bp, Artificial
  Synthesized antisense oligonucleotide
caaatagaggccgatttc

SEQ ID NO: 2346 - DNA, 14 bp, Artificial
  Synthesized antisense oligonucleotide
caaatagaggccga

SEQ ID NO: 2347 - DNA, 14 bp, Artificial
  Synthesized antisense oligonucleotide
cctctaggctggct

SEQ ID NO: 2348 - DNA, 15 bp, Artificial
  Synthesized antisense oligonucleotide
catacctctaggctg

SEQ ID NO: 2349 - DNA, 14 bp, Artificial
  Synthesized antisense oligonucleotide
agccatacctctag

SEQ ID NO: 2350 - DNA, 15 bp, Artificial
  Synthesized antisense oligonucleotide
cagccatacctctag

SEQ ID NO: 2351 - DNA, 17 bp, Artificial
  Synthesized antisense oligonucleotide
cacagagatagttacag

SEQ ID NO: 2352 - DNA, 17 bp, Artificial
  Synthesized antisense oligonucleotide
gtcttcgttttgaacag

SEQ ID NO: 2353 - DNA, 18 bp, Artificial
  Synthesized antisense oligonucleotide
ctagtcttcgttttgaac

SEQ ID NO: 2354 - DNA, 18 bp, Artificial
  Synthesized antisense oligonucleotide
tagctagtcttcgttttg

SEQ ID NO: 2355 - DNA, 13 bp, Artificial
  Synthesized antisense oligonucleotide
gagccactgcgcc

SEQ ID NO: 2356 - DNA, 14 bp, Artificial
  Synthesized antisense oligonucleotide
cgtgagccactgcg

SEQ ID NO: 2357 - DNA, 15 bp, Artificial
  Synthesized antisense oligonucleotide
cgtaacgatcactgg

SEQ ID NO: 2358 - DNA, 15 bp, Artificial
  Synthesized antisense oligonucleotide
gcactcgtaacgatc

SEQ ID NO: 2359 - DNA, 14 bp, Artificial
  Synthesized antisense oligonucleotide
ggagcactcgtaac

SEQ ID NO: 2360 - DNA, 14 bp, Artificial
  Synthesized antisense oligonucleotide
catcatcctgaggt

SEQ ID NO: 2361 - DNA, 16 bp, Artificial
  Synthesized antisense oligonucleotide
cagtatcatcatcctg

SEQ ID NO: 2362 - DNA, 16 bp, Artificial
  Synthesized antisense oligonucleotide
ctcagtatcatcatcc

SEQ ID NO: 2363 - DNA, 18 bp, Artificial
  Synthesized antisense oligonucleotide
ctaaaagtatgtgccatc

SEQ ID NO: 2364 - DNA, 14 bp, Artificial
  Synthesized antisense oligonucleotide
cacatcgcctctct

SEQ ID NO: 2365 - DNA, 18 bp, Artificial
  Synthesized antisense oligonucleotide
gcttcacagtcacatcgc

SEQ ID NO: 2366 - DNA, 16 bp, Artificial
  Synthesized antisense oligonucleotide
ggaaggcttcacagtc

SEQ ID NO: 2367 - DNA, 18 bp, Artificial
  Synthesized antisense oligonucleotide
cctgtgacttgagaattg

SEQ ID NO: 2368 - DNA, 14 bp, Artificial
  Synthesized antisense oligonucleotide
ggaagacctgtgac

SEQ ID NO: 2369 - DNA, 18 bp, Artificial
  Synthesized antisense oligonucleotide
ctctgctccacatatttg

SEQ ID NO: 2370 - DNA, 15 bp, Artificial
  Synthesized antisense oligonucleotide
caacgaagatctctg

SEQ ID NO: 2371 - DNA, 14 bp, Artificial
  Synthesized antisense oligonucleotide
caacaccaacgaag

SEQ ID NO: 2372 - DNA, 14 bp, Artificial
  Synthesized antisense oligonucleotide
ggtcttctgtttgc

SEQ ID NO: 2373 - DNA, 18 bp, Artificial
  Synthesized antisense oligonucleotide
cgatgaagtggtaggaag

SEQ ID NO: 2374 - DNA, 14 bp, Artificial
  Synthesized antisense oligonucleotide
ggttgcatggaagc

SEQ ID NO: 2375 - DNA, 15 bp, Artificial
  Synthesized antisense oligonucleotide
ggtcacaaacttgcc

SEQ ID NO: 2376 - DNA, 17 bp, Artificial
  Synthesized antisense oligonucleotide
ctgatttggtccactag

SEQ ID NO: 2377 - DNA, 16 bp, Artificial
  Synthesized antisense oligonucleotide
catgttagcactgttc

SEQ ID NO: 2378 - DNA, 16 bp, Artificial
  Synthesized antisense oligonucleotide
ggtcttgatgtactcc

SEQ ID NO: 2379 - DNA, 17 bp, Artificial
  Synthesized antisense oligonucleotide
ccacctaaagagagatc

SEQ ID NO: 2380 - DNA, 16 bp, Artificial
  Synthesized antisense oligonucleotide
cttgtactgcaccatc

SEQ ID NO: 2381 - DNA, 16 bp, Artificial
  Synthesized antisense oligonucleotide
gccagttaagaagatg

SEQ ID NO: 2382 - DNA, 17 bp, Artificial
  Synthesized antisense oligonucleotide
gagatcatgatccatgg

SEQ ID NO: 2383 - DNA, 17 bp, Artificial
  Synthesized antisense oligonucleotide
gtagtgtcccaatagtg

SEQ ID NO: 2384 - DNA, 16 bp, Artificial
  Synthesized antisense oligonucleotide
cttcctcatcattccc

SEQ ID NO: 2385 - DNA, 15 bp, Artificial
  Synthesized antisense oligonucleotide
cacaagcttttcgac

SEQ ID NO: 2386 - protein, 129 aa, Homo sapiens
ARSLVCLGVIILLSAFSGPGVRGGPMPKLADRKLCADQECSHPISMAVALQDYMAPDCRFLTIHRQQVVYVFSKLKGRGRLFWGGSVQGDYYDLAARLGYFPSSIVREDQTLKPGKVDVKTDKWDFYCQ

SEQ ID NO: 2387 - protein, 390 aa, Homo sapiens
MPPSGLRLLLLLLPLLWLLVLTPGRPAAGLSTCKTIDMELVKRKRIEAIRGQILSKLRLASPPSQGEVPPGPLPEAVLALYNSTRDRVAGESAEPEPEPEADYYAKEVTRVLMVETHNEIYDKFKQSTHSIYMFFNTSELREAVPEPVLLSRAELRLLRLKLKVEQHVELYQKYSNNSWRYLSNRLLAPSDSPEWLSFDVTGVVRQWLSRGGEIEGFRLSAHCSCDSRDNTLQVDINGFTTGRRGDLATIHGMNRPFLLLMATPLERAQHLQSSRHRRALDTNYCFSSTEKNCCVRQLYIDFRKDLGWKWIHEPKGYHANFCLGPCPYIWSLDTQYSKVLALYNQHNPGASAAPCCVPQALEPLPIVYYVGRKPKVEQLSNMIVRSCKCS

SEQ ID NO: 2388 - protein, 20 aa, Artificial
  Synthesized
ALDTNYCFSSTEKNCCVRQL

SEQ ID NO: 2389 - protein, 20 aa, Artificial
  Synthesized
YIDFRKDLGWKWIHEPKGYH

SEQ ID NO: 2390 - protein, 20 aa, Artificial
  Synthesized
ANFCLGPCPYIWSLDTQYSK

SEQ ID NO: 2391 - protein, 20 aa, Artificial
  Synthesized
VLALYNQHNPGASAAPCCVP

SEQ ID NO: 2392 - protein, 20 aa, Artificial
  Synthesized
QALEPLPIVYYVGRKPKVEQ

SEQ ID NO: 2393 - protein, 12 aa, Artificial
  Synthesized
LSNMIVRSCKCS

SEQ ID NO: 2394 - protein, 20 aa, Artificial
  Synthesized
TEKNCCVRQLYIDFRKDLGW

SEQ ID NO: 2395 - protein, 20 aa, Artificial
  Synthesized
KWIHEPKGYHANFCLGPCPY

SEQ ID NO: 2396 - protein, 19 aa, Artificial
  Synthesized
WSLDTQYSKVLALYNQHNP

SEQ ID NO: 2397 - protein, 20 aa, Artificial
  Synthesized
GASAAPCCVPQALEPLPIVY

SEQ ID NO: 2398 - protein, 22 aa, Artificial
  Synthesized
YVGRKPKVEQLSNMIVRSCKCS

SEQ ID NO: 2399 - protein, 40 aa, Artificial
  Synthesized
QYSKVLALYNQHNPGASAAPCCVPQALEPLPIVYYVGRKP

SEQ ID NO: 2400 - protein, 40 aa, Artificial; identical to SEQ ID NO: 2399
  Synthesized

SEQ ID NO: 2401 - protein, 112 aa, Artificial
  Synthesized
ALDTNYCFSSTEKNCCVRQLYIDFRKDLGWKWIHEPKGYHANFCLGPCPYIWSLDTQYSKVLALYNQHNPGASAAPCCVPQALEPLPIVYYVGRKPKVEQLSNMIVRSCKCS

SEQ ID NO: 2402 - protein, 30 aa, Artificial
  Synthesized
ALDTNYCFSSTEKNCCVRQLYIDFRKDLGW

SEQ ID NO: 2403 - protein, 30 aa, Artificial
  Synthesized
KWIHEPKGYHANFCLGPCPYIWSLDTQYSK

SEQ ID NO: 2404 - protein, 30 aa, Artificial
  Synthesized
VLALYNQHNPGASAAPCCVPQALEPLPIVY

SEQ ID NO: 2405 - protein, 22 aa, Artificial
  Synthesized
YVGRKPKVEQLSNMIVRSCKCS

SEQ ID NO: 2406 - protein, 30 aa, Artificial
  Synthesized
CVRQLYIDFRKDLGWKWIHEPKGYHANFCL

SEQ ID NO: 2407 - protein, 30 aa, Artificial
  Synthesized
GPCPYIWSLDTQYSKVLALYNQHNPGASAA

SEQ ID NO: 2408 - protein, 30 aa, Artificial
  Synthesized
PCCVPQALEPLPIVYYVGRKPKVEQLSNMI

SEQ ID NO: 2409 - protein, 390 aa, Homo sapiens
MPPSQLRLLPLLLPLLWLLVLTPGRPAAGLSTCKTIDMELVKRKRIEAIRGQILSKLRLASPPSQGEVPPGPLPEAVLALYNSTRDRVAGESAEPEPEPEADYYAKEVTRVLMVETHNEIYDKFKQSTHSIYMFFNTSELREAVPEPVLLSRAELRLLRLKLKVEQHVELYQKYSNNSWRYLSNRLLAPSDSPEWLSFDVTGVVRQWLSRGGEIEGFRLSAHCSCDSRDNTLQVDINGFTTGRRGDLATIHGMNRPFLLLMATPLERAQHLQSSRHRRALDTNYCFSSTEKNCCVRQLYIDFRKDLGWKWIHEPKGYHANFCLGPCPYIWSLDTQYSKVLALYNQHNPGASAAPCCVPQALEPLPIVYYVGRKPKVEQLSNMIVRSCKCS

SEQ ID NO: 2410 - protein, 413 aa, Homo sapiens
MHYCVLSAFLILHLVTVALSLSTCSTLDMDQFMRKRIEAIRGQILSKLKLTSPPEDYPEPEEVPPEVISIYNSTRDLLQEKASRRAAACERERSDEEYYAKEVYKIDMPPFFPSENAIPPTFYRPYFRIVRFDVSAMEKNASNLVKAEFRVFRLQNPKARVPEQRIELYQILKSKDLTSPTQRYIDSKVVKTRAEGEWLSFDVTDAVHEWLHHKDRNLGFKISLHCPCCTFVPSNNYIIPNKSEELEARFAGIDGTSTYTSGDQKTIKSTRKKNSGKTPHLLLMLLPSYRLESQQTNRRKRALDAAYCFRNVQDNCCLRPLYIDFKRDLGWKWIHEPKGYNANFCAGACPYLWSSDTQHSRVLSLYNTINPEASASPCCVSQDLEPLTILYYIGKTPKIEQLSNMIVKSCKCS

SEQ ID NO: 2411 - protein, 20 aa, Artificial
  Synthesized
ALDAAYCFRNVQDNCCLRPL

SEQ ID NO: 2412 - protein, 20 aa, Artificial
  Synthesized
YIDFKRDLGWKWIHEPKGYN

SEQ ID NO: 2413 - protein, 20 aa, Artificial
  Synthesized
ANFCAGACPYLWSSDTQHSR

SEQ ID NO: 2414 - protein, 20 aa, Artificial
  Synthesized
VLSLYNTINPEASASPCCVS

SEQ ID NO: 2415 - protein, 20 aa, Artificial
  Synthesized
QDLEPLTILYYIGKTPKIEQ

SEQ ID NO: 2416 - protein, 20 aa, Artificial
  Synthesized
QDLEPLTILYYIGKTPKIEQ

SEQ ID NO: 2417 - protein, 20 aa, Artificial
  Synthesized
VQDNCCLRPLYIDFKRDLGW

SEQ ID NO: 2418 - protein, 20 aa, Artificial
  Synthesized
KWIHEPKGYNANFCAGACPY

SEQ ID NO: 2419 - protein, 20 aa, Artificial
  Synthesized
LWSSDTQHSRVLSLYNTINP

SEQ ID NO: 2420 - protein, 20 aa, Artificial
  Synthesized
EASASPCCVSQDLEPLTILY

SEQ ID NO: 2421 - protein, 22 aa, Artificial
  Synthesized
YIGKTPKIEQLSNMIVKSCKCS

SEQ ID NO: 2422 - protein, 41 aa, Artificial
  Synthesized
QHSRVLSLYNTINPEASASPCCVSQDLEPLTILYYIGKTPK

SEQ ID NO: 2423 - protein, 41 aa, Artificial; identical to SEQ ID NO: 2422
  Synthesized

SEQ ID NO: 2424 - protein, 112 aa, Artificial
  Synthesized
ALDAAYCFRNVQDNCCLRPLYIDFKRDLGWKWIHEPKGYNANFCAGACPYLWSSDTQHSRVLSLYNTINPEASASPCCVSQDLEPLTILYYIGKTPKIEQLSNMIVKSCKCS

SEQ ID NO: 2425 - protein, 30 aa, Artificial
  Synthesized
ALDAAYCFRNVQDNCCLRPLYIDFKRDLGW

SEQ ID NO: 2426 - protein, 29 aa, Artificial
  Synthesized
KWIHEPKGYNANFCAGACPYLWSSDTQHS

SEQ ID NO: 2427 - protein, 29 aa, Artificial
  Synthesized
VLSLYNTINPEASASPCCVSQDLEPLTIL

SEQ ID NO: 2428 - protein, 22 aa, Artificial
  Synthesized
YIGKTPKIEQLSNMIVKSCKCS

SEQ ID NO: 2429 - protein, 30 aa, Artificial
  Synthesized
CLRPLYIDFKRDLGWKWIHEPKGYNANFCA

SEQ ID NO: 2430 - protein, 30 aa, Artificial
  Synthesized
GACPYLWSSDTQHSRVLSLYNTINPEASAS

SEQ ID NO: 2431 - protein, 30 aa, Artificial
  Synthesized
PCCVSQDLEPLTILYYIGKTPKIEQLSNMI

SEQ ID NO: 2432 - protein, 411 aa, Homo sapiens
MHYCVLSAFLILHLVTVALSLSTCSTLDMDQFMRKRIEAIRGQILSKLKLTSPPEDYPEPEEVPPEVISIYNSTRDLLQEKASRRAAACERERSDEEYYAKEVYKIDMPPFFPSENAIPPTFYPYFRIVRFDVYAMEKNASNLVKAEFRVFRLQNPKAVPEQRIELYQILKSKDLTSPTQRYIDSKYYKTRAEGEWLSFDVTDAVHEWLHHKDRNLGFKISLHCPCCTFVPSNNYIIPNKSEELEARFAGIDGTSTYTSGDQKTIKSTRKKNSGKTPHLLLMLLPSYRLESQQTNRRKKRALDAAYCFRNVQDNCCLRPLYIDFKRDLGWKWIHEPKGYNANFCAGACPYLWSSDTQHSRVLSLYNTINPEASASPCCVSQDLEPLTILYYIGKTPKIEQLSNMIVKSKCS

SEQ ID NO: 2433 - protein, 412 aa, Homo sapiens
MKMHLQRALVVLALLNFATVSLSLSTCTTLDFGHIKKKRVEAIRGQILSKLRLTSPPEPTVMTHVPYQVLALYNSTRELLEEMHGEREEGCTQENTESEYYAKEIHKFDMIQGLAEHNELAVCPKGITSKVFRFNVSSVEKNRTNLFRAEFRVLRVPNPSSKRNEQRIELFQILRPDEHIAKQRYIGGKNLPTRGTAEWLSFDVTDTVREWLLRRESNLGLEISIHCPCHTFQPNGDILENIHEVMEIKFKGVDNEDDHGRGDLGRLKKQKDHHNPHLILMMIPPHRLDNPGQGGQRKKRALDAAYCFRNVQDNCCLRPLYIDFKRDLGWKWIHEPKGYNANFCAGACPYLWSSDTQHSRVLSLYNTINPEASASPCCVSQDLEPLTILYYIGKTPKIEQLSNMIVKSCKCS

SEQ ID NO: 2434 - protein, 20 aa, Artificial
  Synthesized
ALDTNYCFRNLEENCCVRPL

SEQ ID NO: 2435 - protein, 20 aa, Artificial
  Synthesized
YIDFRQDLGWKWVHEPKGYY

SEQ ID NO: 2436 - protein, 20 aa, Artificial
  Synthesized
ANFCSGPCPYLRSADTTHST

SEQ ID NO: 2437 - protein, 20 aa, Artificial
  Synthesized
VLGLYNTLNPEASASPCCVP

SEQ ID NO: 2438 - protein, 20 aa, Artificial
  Synthesized
QDLEPLTILYYVGRTPKVEQ

SEQ ID NO: 2439 - protein, 12 aa, Artificial
  Synthesized
LSNMVVKSCKCS

SEQ ID NO: 2440 - protein, 20 aa, Artificial
  Synthesized
NLEENCCVRPLYIDFRQDLG

SEQ ID NO: 2441 - protein, 20 aa, Artificial
  Synthesized
WKWVHEPKGYYANFCSGPCP

SEQ ID NO: 2442 - protein, 20 aa, Artificial
  Synthesized
YLRSADTTHSTVLGLYNTLN

SEQ ID NO: 2443 - protein, 20 aa, Artificial
  Synthesized
PEASASPCCVPQDLEPLTIL

SEQ ID NO: 2444 - protein, 23 aa, Artificial
  Synthesized
YYVGRTPKVEQLSNMVVKSCKCS

SEQ ID NO: 2445 - protein, 41 aa, Artificial
  Synthesized
THSTVLGLYNTLNPEASASPCCVPQDLEPLTILYYVGRTPK

SEQ ID NO: 2446 - protein, 41 aa, Artificial; identical to SEQ ID NO: 2445
  Synthesized

SEQ ID NO: 2447 - protein, 112 aa, Artificial; identical to SEQ ID NO: 2424
  Synthesized

SEQ ID NO: 2448 - protein, 30 aa, Artificial; identical to SEQ ID NO: 2425
  Synthesized

SEQ ID NO: 2449 - protein, 30 aa, Artificial
  Synthesized
KWIHEPKGYNANFCAGACPYLWSSDTQHSR

SEQ ID NO: 2450 - protein, 30 aa, Artificial
  Synthesized
VLSLYNTINPEASASPCCVSQDLEPLTILY

SEQ ID NO: 2451 - protein, 22 aa, Artificial
  Synthesized
YIGKTPKIEQLSNMIVKSCKCS

SEQ ID NO: 2452 - protein, 30 aa, Artificial; identical to SEQ ID NO: 2429
  Synthesized

SEQ ID NO: 2453 - protein, 30 aa, Artificial; identical to SEQ ID NO: 2430
  Synthesized

SEQ ID NO: 2454 - protein, 30 aa, Artificial; identical to SEQ ID NO: 2431
  Synthesized

SEQ ID NO: 2455 - protein, 411 aa, Homo sapiens
MKMHLQRALVVLALLNFATVSLSLSTCTTLDFGHIKKKRVEAIRGQILSKLRLTSPPEPTVMTHVPYQVLALYNSTRELLEEMHGEREEGCTQENESEYYAKEIHKFDMIQGLAEHNELAVCPKGITSKVFRFNVSSVEKNRTNLFRAEFRVLRVPNPSSKRNEQRIELFQILRPDEHIAKQRYIGGKNLPTRGTAEWLSFDVTDTVREWLLRRESNLGLEISIHCPCHTFQPNGDILENIHEVMEIKFKGVDNEDDHGRGDLGRLKKQKDHHNPHLILMMIPPHRLDNPGQGGQRKKRALDTNYCFRNLEENCCVRPLYIDFRQDLGWKWVHEPKGYYANFCSGPCPYLRSADTTHSTVLGLYNTLNPEASASPCCVPQDLEPLTILYYVGRTPKVEQLSNMVVKSCKCS

SEQ ID NO: 2456 - protein, 7 aa, Artificial
  Synthesized
VPHIPPN

SEQ ID NO: 2457 - protein, 7 aa, Artificial
  Synthesized
MPPTQVS

SEQ ID NO: 2458 - protein, 7 aa, Artificial
  Synthesized
QMHPWPP

SEQ ID NO: 2459 - protein, 7 aa, Artificial
  Synthesized
QPPFWQF

SEQ ID NO: 2460 - protein, 7 aa, Artificial
  Synthesized
TPPQGLA

SEQ ID NO: 2461 - protein, 7 aa, Artificial
  Synthesized
IPPYNTL

SEQ ID NO: 2462 - protein, 7 aa, Artificial
  Synthesized
AVRPAPL

SEQ ID NO: 2463 - protein, 7 aa, Artificial
  Synthesized
GAKPHPQ

SEQ ID NO: 2464 - protein, 7 aa, Artificial
  Synthesized
QQLSPLP

SEQ ID NO: 2465 - protein, 7 aa, Artificial
  Synthesized
GPPPSPV

SEQ ID NO: 2466 - protein, 7 aa, Artificial
  Synthesized
LPLTPLP

SEQ ID NO: 2467 - protein, 12 aa, Artificial
  Synthesized
QLNVNHQARADQ

SEQ ID NO: 2468 - protein, 12 aa, Artificial
  Synthesized
TSASTRPELHYP

SEQ ID NO: 2469 - protein, 12 aa, Artificial
  Synthesized
TFLPHQMHPWPP

SEQ ID NO: 2470 - protein, 12 aa, Artificial
  Synthesized
VPHIPPNSMALT

SEQ ID NO: 2471 - protein, 12 aa, Artificial
  Synthesized
RLTLLVLIMPAP

SEQ ID NO: 2472 - protein, 9 aa, Artificial
  Synthesized
RKLPPRPRR

SEQ ID NO: 2473 - protein, 12 aa, Artificial
  Synthesized
VLASQIATTPSP

SEQ ID NO: 2474 - protein, 12 aa, Artificial
  Synthesized
TPLTKLPSVNHP

SEQ ID NO: 2475 - protein, 13 aa, Artificial
  Synthesized
PPNSFSSAGGQRT

SEQ ID NO: 2476 - protein, 15 aa, Artificial
  Synthesized
EQDSRQGQELTKKGL

SEQ ID NO: 2477 - protein, 13 aa, Artificial
  Synthesized
ETTIVITWTPAPR

SEQ ID NO: 2478 - protein, 13 aa, Artificial
  Synthesized
TSLLISWDAPAVT

SEQ ID NO: 2479 - protein, 13 aa, Artificial
  Synthesized
NSLLVSWQPPRAR

SEQ ID NO: 2480 - protein, 12 aa, Artificial
  Synthesized
YNLPKVSSNLSP

SEQ ID NO: 2481 - protein, 12 aa, Artificial
  Synthesized
MPPTQVSKFRLI

SEQ ID NO: 2482 - protein, 12 aa, Artificial
  Synthesized
ANIDATPLFLRA

SEQ ID NO: 2483 - protein, 12 aa, Artificial
  Synthesized
LLRTTETLPMFL

SEQ ID NO: 2484 - protein, 7 aa, Artificial
  Synthesized
SALEPLV

SEQ ID NO: 2485 - protein, 7 aa, Artificial
  Synthesized
GSPTPNA

SEQ ID NO: 2486 - protein, 7 aa, Artificial
  Synthesized
APSHATH

SEQ ID NO: 2487 - protein, 7 aa, Artificial
  Synthesized
TTVGHSD

SEQ ID NO: 2488 - protein, 7 aa, Artificial
  Synthesized
THFSTFT

SEQ ID NO: 2489 - protein, 7 aa, Artificial
  Synthesized
SLLLDTS

SEQ ID NO: 2490 - protein, 12 aa, Artificial
  Synthesized
SVAMKAHKPLLP

SEQ ID NO: 2491 - protein, 12 aa, Artificial
  Synthesized
NTIPGFASKSLD

SEQ ID NO: 2492 - protein, 12 aa, Artificial
  Synthesized
VSNYKFYSTTSS

SEQ ID NO: 2493 - protein, 12 aa, Artificial
  Synthesized
VSRHQSWHPHDL

SEQ ID NO: 2494 - protein, 12 aa, Artificial
  Synthesized
HLNILSTLWKYR

SEQ ID NO: 2495 - protein, 12 aa, Artificial
  Synthesized
HNASPSWGSPVM

SEQ ID NO: 2496 - protein, 12 aa, Artificial
  Synthesized
SHPWNAQRELSV

SEQ ID NO: 2497 - protein, 12 aa, Artificial
  Synthesized
HHWPFWRTLPLS

SEQ ID NO: 2498 - protein, 12 aa, Artificial
  Synthesized
WHTKFLPRYLPS

SEQ ID NO: 2499 - protein, 12 aa, Artificial
  Synthesized
NNTSFTVVPSVP

SEQ ID NO: 2500 - protein, 12 aa, Artificial
  Synthesized
SHLSTWKWWQNR

SEQ ID NO: 2501 - protein, 12 aa, Artificial
  Synthesized
FHWHPRLWPLPS

SEQ ID NO: 2502 - protein, 12 aa, Artificial
  Synthesized
WHWTYGWRPPAM

SEQ ID NO: 2503 - protein, 12 aa, Artificial
  Synthesized
FHWRYPLPLPGQ

SEQ ID NO: 2504 - protein, 12 aa, Artificial
  Synthesized
WHWPLFIPNTTA

SEQ ID NO: 2505 - protein, 12 aa, Artificial
  Synthesized
WHNGIWWHYGVR

SEQ ID NO: 2506 - protein, 12 aa, Artificial
  Synthesized
HHLNYLWPWTRV

SEQ ID NO: 2507 - protein, 12 aa, Artificial
  Synthesized
FWHRWSTFPEQP

SEQ ID NO: 2508 - protein, 12 aa, Artificial
  Synthesized
WHMSYFWTRPPQ

SEQ ID NO: 2509 - protein, 12 aa, Artificial
  Synthesized
FHLNWPSRADYL

SEQ ID NO: 2510 - protein, 12 aa, Artificial
  Synthesized
WHKNTNWPWRTL

SEQ ID NO: 2511 - protein, 12 aa, Artificial
  Synthesized
ALSPSQSHPVRS

SEQ ID NO: 2512 - protein, 12 aa, Artificial
  Synthesized
GTQSTAIPAPTD

SEQ ID NO: 2513 - protein, 4 aa, Artificial
  Synthesized peptide's cleavage site
  misc_feature (2)..(2): Xaa can be any amino acid
  misc_feature (3)..(3): Xaa can be any amino acid
RXXR

SEQ ID NO: 2514 - protein, 4 aa, Artificial
  dimerisation motif
ASPC

SEQ ID NO: 2515 - DNA, 19 bp, Artificial
  Synthesized antisense oligonucleotide
caaaatatatttgcaaatg

SEQ ID NO: 2516 - DNA, 18 bp, Artificial
  Synthesized antisense oligonucleotide
caaaatatatttgcaaat

SEQ ID NO: 2517 - DNA, 15 bp, Artificial
  Synthesized antisense oligonucleotide
caaaatatatttgca

SEQ ID NO: 2518 - DNA, 14 bp, Artificial
  Synthesized antisense oligonucleotide
caaaatatatttgc

SEQ ID NO: 2519 - DNA, 16 bp, Artificial
  Synthesized antisense oligonucleotide
ttccaaaatatatttg

SEQ ID NO: 2520 - DNA, 17 bp, Artificial
  Synthesized antisense oligonucleotide
ttttccaaaatatattt

SEQ ID NO: 2521 - DNA, 17 bp, Artificial
  Synthesized antisense oligonucleotide
gttttccaaaatatatt

SEQ ID NO: 2522 - DNA, 14 bp, Artificial
  Synthesized antisense oligonucleotide
gttttccaaaatat

SEQ ID NO: 2523 - DNA, 14 bp, Artificial
  Synthesized antisense oligonucleotide
ggttaggcaaagcc

SEQ ID NO: 2524 - DNA, 18 bp, Artificial
  Synthesized antisense oligonucleotide
ccgagaacatcatcgtgg

SEQ ID NO: 2525 - DNA, 17 bp, Artificial
  Synthesized antisense oligonucleotide
ccgagaacatcatcgtg

SEQ ID NO: 2526 - DNA, 15 bp, Artificial
  Synthesized antisense oligonucleotide
ccgagaacatcatcg

SEQ ID NO: 2527 - DNA, 18 bp, Artificial
  Synthesized antisense oligonucleotide
cgtagtctgcgttgaagc

SEQ ID NO: 2528 - DNA, 15 bp, Artificial
  Synthesized antisense oligonucleotide
ccatgctggagaagg

SEQ ID NO: 2529 - DNA, 14 bp, Artificial
  Synthesized antisense oligonucleotide
ccgtgcagaagtcc

SEQ ID NO: 2530 - DNA, 14 bp, Artificial
  Synthesized antisense oligonucleotide
ggaatgaagttggc

SEQ ID NO: 2531 - DNA, 14 bp, Artificial
  Synthesized antisense oligonucleotide
tgaccgtgggaatg

SEQ ID NO: 2532 - DNA, 14 bp, Artificial
  Synthesized antisense oligonucleotide
tggcagtgaccgtg

SEQ ID NO: 2533 - DNA, 14 bp, Artificial
  Synthesized antisense oligonucleotide
agatggcagtgacc

SEQ ID NO: 2534 - DNA, 16 bp, Artificial
  Synthesized antisense oligonucleotide
cgagatggcagtgacc

SEQ ID NO: 2535 - DNA, 14 bp, Artificial
  Synthesized antisense oligonucleotide
ccagccactgcagg

SEQ ID NO: 2536 - DNA, 14 bp, Artificial
  Synthesized antisense oligonucleotide
gcaccagccactgc

SEQ ID NO: 2537 - DNA, 14 bp, Artificial
  Synthesized antisense oligonucleotide
ccctggagtaagcc

SEQ ID NO: 2538 - DNA, 18 bp, Artificial
  Synthesized antisense oligonucleotide
ggagataactgttccacc

SEQ ID NO: 2539 - DNA, 15 bp, Artificial
  Synthesized antisense oligonucleotide
ggagataactgttcc

SEQ ID NO: 2540 - DNA, 15 bp, Artificial
  Synthesized antisense oligonucleotide
cttctagttggtctg

SEQ ID NO: 2541 - DNA, 14 bp, Artificial
  Synthesized antisense oligonucleotide
catcttctagttgg

SEQ ID NO: 2542 - DNA, 17 bp, Artificial
  Synthesized antisense oligonucleotide
tctcatcttctagttgg

SEQ ID NO: 2543 - DNA, 18 bp, Artificial
  Synthesized antisense oligonucleotide
ctgcaaagcagacttctc

SEQ ID NO: 2544 - DNA, 15 bp, Artificial
  Synthesized antisense oligonucleotide
ccttcagcaggttgg

SEQ ID NO: 2545 - DNA, 14 bp, Artificial
  Synthesized antisense oligonucleotide
cccaggtcatcagg

SEQ ID NO: 2546 - DNA, 15 bp, Artificial
  Synthesized antisense oligonucleotide
ccagtcagatcaagg

SEQ ID NO: 2547 - DNA, 15 bp, Artificial
  Synthesized antisense oligonucleotide
ggtgaaggcctcctc

SEQ ID NO: 2548 - DNA, 15 bp, Artificial
  Synthesized antisense oligonucleotide
cagggtgaaggcctc

SEQ ID NO: 2549 - DNA, 15 bp, Artificial
  Synthesized antisense oligonucleotide
cctggatgatgctgg

SEQ ID NO: 2550 - DNA, 14 bp, Artificial
  Synthesized antisense oligonucleotide
ccactgtgcagagg

SEQ ID NO: 2551 - DNA, 15 bp, Artificial
  Synthesized antisense oligonucleotide
ggagtacaggtgacc

SEQ ID NO: 2552 - DNA, 15 bp, Artificial
  Synthesized antisense oligonucleotide
gctcattgctgctgc

SEQ ID NO: 2553 - DNA, 17 bp, Artificial
  Synthesized antisense oligonucleotide
ggaaggctcattgctgc

SEQ ID NO: 2554 - DNA, 14 bp, Artificial
  Synthesized antisense oligonucleotide
ttttctcttcttct

SEQ ID NO: 2555 - DNA, 14 bp, Artificial
  Synthesized antisense oligonucleotide
atcttattcctttc

SEQ ID NO: 2556 - DNA, 14 bp, Artificial
  Synthesized antisense oligonucleotide
catcttattccttt

SEQ ID NO: 2557 - DNA, 14 bp, Artificial
  Synthesized antisense oligonucleotide
tagtttttccttct

SEQ ID NO: 2558 - DNA, 14 bp, Artificial
  Synthesized antisense oligonucleotide
tctagtttttcctt

SEQ ID NO: 2559 - DNA, 14 bp, Artificial
  Synthesized antisense oligonucleotide
aactctagtttttc

SEQ ID NO: 2560 - DNA, 14 bp, Artificial
  Synthesized antisense oligonucleotide
gaactctagttttt

SEQ ID NO: 2561 - DNA, 15 bp, Artificial
  Synthesized antisense oligonucleotide
tgaactctagttttt

SEQ ID NO: 2562 - DNA, 16 bp, Artificial
  Synthesized antisense oligonucleotide
atgaactctagttttt

SEQ ID NO: 2563 - DNA, 14 bp, Artificial
  Synthesized antisense oligonucleotide
tgaactctagtttt

SEQ ID NO: 2564 - DNA, 15 bp, Artificial
  Synthesized antisense oligonucleotide
atgaactctagtttt

SEQ ID NO: 2565 - DNA, 14 bp, Artificial
  Synthesized antisense oligonucleotide
atgaactctagttt

SEQ ID NO: 2566 - DNA, 14 bp, Artificial
  Synthesized antisense oligonucleotide
gcacacagtagtgc

SEQ ID NO: 2567 - DNA, 16 bp, Artificial
  Synthesized antisense oligonucleotide
gcaggatcagaaaagc

SEQ ID NO: 2568 - DNA, 14 bp, Artificial
  Synthesized antisense oligonucleotide
gcaggtagacaggc

SEQ ID NO: 2569 - DNA, 17 bp, Artificial
  Synthesized antisense oligonucleotide
gcttgctcaggatctgc

SEQ ID NO: 2570 - DNA, 15 bp, Artificial
  Synthesized antisense oligonucleotide
gcaagtccctggtgc

SEQ ID NO: 2571 - DNA, 14 bp, Artificial
  Synthesized antisense oligonucleotide
cctggagcaagtcc

SEQ ID NO: 2572 - DNA, 17 bp, Artificial
  Synthesized antisense oligonucleotide
cgtagtactcttcgtcg

SEQ ID NO: 2573 - DNA, 14 bp, Artificial
  Synthesized antisense oligonucleotide
cgtagtactcttcg

SEQ ID NO: 2574 - DNA, 14 bp, Artificial
  Synthesized antisense oligonucleotide
gtaaacctccttgg

SEQ ID NO: 2575 - DNA, 19 bp, Artificial
  Synthesized antisense oligonucleotide
gtctattttgtaaacctcc

SEQ ID NO: 2576 - DNA, 20 bp, Artificial
  Synthesized antisense oligonucleotide
gcatgtctattttgtaaacc

SEQ ID NO: 2577 - DNA, 15 bp, Artificial
  Synthesized antisense oligonucleotide
ggcatcaaggtaccc

SEQ ID NO: 2578 - DNA, 14 bp, Artificial
  Synthesized antisense oligonucleotide
ggcatcaaggtacc

SEQ ID NO: 2579 - DNA, 20 bp, Artificial
  Synthesized antisense oligonucleotide
gctttcaccaaattggaagc

SEQ ID NO: 2580 - DNA, 18 bp, Artificial
  Synthesized antisense oligonucleotide
gagaatctgatatagctc

SEQ ID NO: 2581 - DNA, 19 bp, Artificial
  Synthesized antisense oligonucleotide
ggagatgttaaatctttgg

SEQ ID NO: 2582 - DNA, 14 bp, Artificial
  Synthesized antisense oligonucleotide
gctgtcgatgtagc

SEQ ID NO: 2583 - DNA, 20 bp, Artificial
  Synthesized antisense oligonucleotide
ccaggttcctgtctttatgg

SEQ ID NO: 2584 - DNA, 14 bp, Artificial
  Synthesized antisense oligonucleotide
cagcagggacagtg

SEQ ID NO: 2585 - DNA, 19 bp, Artificial
  Synthesized antisense oligonucleotide
cttgcttctagttcttcac

SEQ ID NO: 2586 - DNA, 15 bp, Artificial
  Synthesized antisense oligonucleotide
gccatcaatacctgc

SEQ ID NO: 2587 - DNA, 15 bp, Artificial
  Synthesized antisense oligonucleotide
ggtgccatcaatacc

SEQ ID NO: 2588 - DNA, 16 bp, Artificial
  Synthesized antisense oligonucleotide
ccactggtatatgtgg

SEQ ID NO: 2589 - DNA, 18 bp, Artificial
  Synthesized antisense oligonucleotide
ggactttatagttttctg
